United States Patent Application Publication US 2024/0226191 A1 - sequence listing, part 3

SEQ ID NO: 26 - DNA, 3086295 bp, Mediterraneibacter faecis (residues 1-1,543,148 of 3,086,295)
ctgaattgcatgaaatatataaaaaacattgacaattaaaaacagctgtgataagataacattcgtcgctgaggaacagcaaggaaaacaacagaggaacggaagatgaaagaagacgcggaggcgggacattcttgatcggaaggaaactggaagatttaaaaatcaatgaaatgattgaaaaataaatcaaaaaagttgttgacaaagagttctgaaagtgatatcctaaataggctgtcgcgtgagacggcaaaggaaagcttgaaaagagcgacaaagaaaaataaaaaagttcttgacaaagacaaaagcttttgataaaatataaaagctgtcgcttggaaagaacgacacaaacaaagaaccttgataactgaacaatagacaacaacaacccttgaaaatttctttaagagaagatttttaagaacggtttttaaacaaaccaaaacaacagtaaaaagggaagaattagctagttagttggttctgaactggatacaaacacttttaacgagagtttgatcctggctcaggatgaacgctggcggcgtgcttaacacatgcaagtcgaacgaagcaccttgatttgattcttcggatgaagatcttggtgactgagtggcggacgggtgagtaacgcgtgggtaacctgccctcatacagggggataacagttagaaatgactgctaataccgcataagaccacagcaccgcatggcgcaggggtaaaaactccggtggtatgagatggacccgcgtctgattaggtagttggtggggtaacggcctaccaagccgacgatcagtagccgacctgagagggtgaccggccacattgggactgagacacggcccaaactcctacgggagagcagcagtggggaatattgcacaatggggggaaaccctgatgcagcgacgccgcgtgagcgatgaagtatttcggtatgtaaagctctatcagcagggaagaaaatgacggtacctgactaagaagcaccggctaaatacgtgccagcagccgcggtaatacgtatggtgcaagcgttatccggatttactgggtgtaaagggagcgtagacggagtggcaagtctgatgtgaaaacccggggctcaaccccgggactgcattggaaactgtcaatctagagtaccggagaggtaagcggaattcctagtgtagcggtgaaatgcgtagatattaggaggaacaccagtggcgaaggcggcttactggacggtaactgacgttgaggctcgaaagcgtggggagcaaacaggattagataccctggtagtccacgccgtaaacgatgactactaggtgtcgggcagcaaagctgttcggtgccgcagcaaacgcaataagtagtccacctggggagtacgttcgcaagaatgaaactcaaaggaattgacggggacccgcacaagcggtggagcatgtggtttaattcgaagcaacgcgaagaaccttacctgctcttgacatctccctgaccggcaagtaatgttgcctttccttcgggacagggatgacaggtggtgcatggttgtcgtcagctcgtgtcgtgagatgttgggttaagtcccgcaacgagcgcaacccctatctttagtagccagcggtttggccgggcactctagagagactgctagggataacctggaggaaggtggggatgacgtcaaatcatcatgccccttatgagcagggctacacacgtgctacaatggcgtaaacaaagggaggcagaatcgcgaggtcgagcaaatcccaaaaataacgtctcagttcggattgtagtctgcaactcgactacatgaagctggaatcgctagtaatcgcgaatcagaatgtcgcggtgaatacgttcccgggtcttgtacacaccgcccgtcacaccatgggagtcagtaacgcccgaagtcagtgacccaaccgtaaggagggagctgccgaaggtgggaccgataactggggtgaagtcgtaacaaggtagccgtatcggaaggtgcggctggatcacctcctttctaaggaagaaatgctttctttcgtctggaacaatccaactaaaacggaagaaagaagtagagagtttttactgttgtctattgttgggttatcaagtaaccaaagcttttggtggcgatgcgcttaggggtaacacccgttcccatcccgaacacgatggtaaagacctaagcggccgatggtactgcactggagacggtgtgggagagtaggtggccgccaaattaaaaagaaaataaaccgagaggttctgcgataaagctggtcttcaccagtgatcagagtttaaaagaaagcttttagtctctgatgactgatgaaaaagtcagtcagatgaagaactgaataagggcttcatcttatgtaccttgaaaactgcatatagtaaaaatcaatagatttagataaatatctaatcaagacatccgaggtaatgttaacaacattaacttacagtctgaagaaaacagacttaaaacaaattgactatcaccaacgcatacaacgctatgtatgtgtggacgttatcccattcccgtgggatgaggtcgagttggttatgctgataagagcgtatggtggatgccttggcactaagagccgatgaaagacgtgataagctgcgaaaagcttcggggaggagcaaatatcctttgatccggagatttctgaatggggaaacctacttgagcaaacctcaagtatccttaagccaatacataacttaaggaagggaacccggtgaactgaaacatctaagtagccggaggaagagaaaacaacatgtgattctgtgagtagcggcgagcgaaaacggaagagcccaaaccagcgtgcgtgcatgctggggttcggaccgcggaattgattcaacgagtttagcagaacggttttgggaaagccggccagagagggtgaaagccccgtaagcgaaagacgagttgacatggcgggatccagagtaccacgagacacgtggaaccttgtgggaagatgcggggaccaccccgtaaggctaaatactacttagtgaccgatagcgcatagtactgtgaaggaaaggtgaaaaggaccccgggaggggagtgaaaaagaacctgaaaccatatgtttacaagctgtggaagagctttatatgctcaaccgcgtactttttgtagaacggtccggcgagttacgctggctggcgaggttaaggactaaaggtccggagccgaagggaaaccaagtctgaatagggcgcatagtcagtcggagtagacccgaaaccgggtgatctatccatgtccaggttgaagttgccgtaaaaggcaatggaggaccgaacccacatccgttgaaaagggtggggatgaggtgtggataggggagaaattccaatcgaacccggagatagctggttctcctcgaaatagctttagggctagcctcatacgagtcttgcggaggtagagcactgaattcctaagggggcgtcaaagcttactaagggatatcaaactccgaatgccgtgtagatgatgtatgggagtcagacgatccgagataagttgggtggtcaaaagggaaagagcccagaccaacagctaaggccccaaaatgtgtgttaagtggaaaaggatgtgggatttcgaagacaactaggatgttggctcagaagcagccattcattcaaagagtgcgtaatagctcactagtcgagaggtcctgcgccgaaaatgtccggggctaaaacacactgccgaagctttggaattgaattaattcaattggtagaggagcattcttaaagggacgaagcagtaccgtaaggagctgtggacttttaagaagagagaatgccggaatgagtagcgagaggaaggtgggaatccttccggccgaatatctaaggtttccagagtaaagctgatctgctctgggtaagtcggggcctaaggcgaggtcgaaagacgtagtcgatggataacaggttgaaattcctgtactatcctgtaacagaactgtggggacacaggcagagagcgtgagccgggaatggaaagaccggtacaagcgaggtaggagaagagttggcaaatccgctctttaatctgaagacgtgatgtggactgaaaataagtagggaagcacgtgagctgactgtcaagaaaagccgctattgtttgcaggatacccgtaccgtaaaccgacacaggtggatgaggagagaatcctaaggccgacgggagaagcattgttaaggaactcggcaaaatgactccgtaacttcgggagaaggagtgccagtaagatggccgcagagaattggcccaagcaactgtttagcaaaaacacaggtctatgcaaaaccgaaaggtgaggtatatgggctgacgcctgcccggtgctggaaggttaaggggagaggttagcgcaagcgaagctttgaacttaagccccagtaaacggcggccgtaactataacggtcctaaggtagcgaaattccttgtcgggtaagttccgacccgcacgaaaggcgtaatgatttgggcactgtctcaacaatgtacccggtgaaattgaaataccagtgaagatgctggttacctgcgccaggacggaaagaccccatggagctttactccagcttgatactgggattcggtattgcatgtacaggataggtgggaggctaggaaatggtaacgccagttgccatggagccaatgttgggataccacccttgcagtactgggtttctaaccagcagccgtgatccggctgggggacaatgtcaggtggggagtttgactggggcggtcgcctccgaaagggtatcggaggcgctcaaaggttccctcagaatggttggaaaccattcgaagagtgcaaaggcagaagggagcttgactgcgacaccgacgggtggagcaggtacgaaagtaggacttagtgatccggtggtataaagtgggattgccatcgctcaacggataaaagctaccctggggataacaggcttatcactcccaagagttcacatcgacggagtggtttggcacctcgatgtcggctcatcgcatcctggggctgaagtaggtcccaagggttgggctgttcgcccattaaagcggtacgcgagctgggttcagaacgtcgtgagacagttcggtccctatccggcgtgggcgtaagatatttgagaggagctgtccttagtacgagaggaccgggatggactggccgctggtgtatctgttgtcttaccaaaggcatagcagagtagccaagccgggaagggataaacgctgaaggcatctaagcgtgaagcccccctcaagatgagatatctcataacgtcaagttagtaagaccccttgaagacgacgaggtagatagggcagaggtggaagtgtggtaacacatggagctgactgttactaataggtcgagggcataaccaaagcagtgataggtttggatgatgatgttggttttgactgtatgtagttttgaaggtacatggaatatagacagaaatgagaagcagtgcgaaagcgctgtttttttgttaaacaatttgagtttgtaatgaaaaataaaaagaaataacgtaatatagaggtagtagaataagcaaaaaggagtgtgtcaaaatggcaagaatcgatcacgcagcaatccgcacgaaatcatatgaagaagctcagagattctttgaagatgtatttgagatgcatatgtggagagaaatcggtgaaaaaccgggaagaaaatgctggtacaaagaaggtattcagctttgcgaagtagaggagctgaatgcagcatcagaaaatggatatgatcacatttccattgcagtagattcagaggcagagattatggagaaaatcaaagcgtatccggtaaaagcaatcaatgaccattggttttcgcttccaaacggaacaaagattgagctaaaaccgctggcagagtggaaagtagatgtataaaacctcacaaggagattatgaagtatgagattaagaaatattttgattgttgtagaagatattgagaaatcgaagaaattttatcatgatttatttggacttgatgtaatacttgataatgaagaaaatgtcattctgacagagggacttgttcttcaggagaaaacaatttggaagaactttctggaaagagatatcatttcagagagtaattcctgtgagttatattttgaggagaagaatatcgaagcttttgtcgaaaaactggataagctttatccggatataaagtatgtgaatcgtttgatgacgcatagctggggacagaagattgttcgtttttatgatttggatggaaatctgatagaggttggaacaccaatgtaaaaaacctgcttaatagtattagtaaaaagaaagaaatcgacaggatgaaaatgataagctcatttagaaaacatcctgtcggtttcttttatttacgcgagcaacgagccaaagtccgtacttgcacgggaccttggagaatgctgcgataactatctgatcatccctagaaatgcttcatgaatccgtgtgtcctgatctaattccggatgaaatgcaaatgccatctgattcttatatttcactccgacaatacgatcctgtacgatactgagaatctcaggtgtgtttccggaagcgtcagcatgaatggattctacaaaaggggcacggatgaaagtcataggaatttcaccgataccggctgcttcagcatttgtatggaagcttccaagctggcgaccataggcgtttcgtttgattgtcataggaatggtttcaaaataggtttcgtcctgttcagcaatgtcagaagccaggagaatcattccggcacaagtggccagaacaggcattccggattgaatcttttcttttaaaggttcgaacatgttaagatcgtgtaagagttttccctgaacggtgctttcaccgccgggaaggataatcccatcaaaatctttttgcagatcagaagcctgtcggagttcaatggtatgaactccaagcttttgaagcatctgttcgtgctctatgaatgctccttgaagggcaagtactgcgattgtcattttattttcctctttctgccatgagaagttcaatttcctgttcgttgatgccgaccatagcttcaccaaggtcagatgaaagttcagcgatcagatttgcatctgtatagtttgtaacggcctgtacgatagcagcagcacgtttcgccggatttccggatttgaagataccggaaccgacaaagactccctctgcgcctaactgcatcataagagcagcatcagcaggagttgcaacaccgccggcagcaaagtttacaacaggaagttttccgtttttatgtacataaaggacaagatcataaggaacctgcaactgtttggctgcctcgaaaagttcatcttcacgcatacttactagtttggaaatttcactgttcattttgcgcatatggcgaactgcctgaacaatatcaccggttcccggttcaccttttgtacggatcatagaagctccttcattgatacgtctaagtgcttcgccaagatcttttgcaccgcagacaaatggaacatcaaactctcttttgttaatatggtagacatcatctgcaggtgaaaggacttcgctttcatcaatatagtcgatttcaattgcctgaagtacctgagcttctgcaaaatgtccgattctgcatttggccataacagggattgaaacagcttcctggattcctttgatcatcttcgggtcactcatacgggaaactccaccagcagcgcggatatcagccggaattctttccagcgccataacagcacatgcaccggcagcttctgcaatctttgcctgttccggagttgtaacatccatgatcactccaccttttaacatctgtgccagatttttattcaattcataacgttcattatttgtactcatttttaaatctccttttctttactaattcgataggtaatagtataatgacaaagtgactatataaaaatactcagttttgatatattcaaaaaggtcagaatggagaaaaagtaaatatgttgacgtataattttgaaaatatagggtcagatacgctctatgaatatttgtataaatgtatcaagaatgacattattcaagggaaaattaaaagtggagaaaaacttccatcgaagcgtgcacttgcaaaaaatctggccataagtgtgatcactgtcgagaatgcctatggtcagcttgcagcagagggatatatttattccgttccaaagagtggattttatgtagcagacctgcgggatgacagaatgaaaagtgagagtggtttatcagaaaatagaatttacagcaataagcttaaccttaccggtggaaaaaatgcttatattgcagattttacgagtaatcagacagaacaaagtgtattcccattttctatttggacaaagacgatgcgggcagtaatgaatgactatcagactgaattgatgcttaatccaccgtgtggcggagtaatggaattaagacaaagcattgcggattatctgaaagcattccgaaatatgacggtgcgaccggaacagatcattattggtgctggaacagaatatttgtccagtcttttgattcagcttttgggaaaagaattgaaatattcagttgaaaatccgggatatcataaaatcgcaaaaatttatcgcagtatgggagcttgttatgagtatatagaaatagaagaggacggaccgaaggtagaagaactggaagaaaaagaaatcaatgtgatacattgttctccgtcacatcattatccaacgggaatcgtaatgccaatcagtaaacgttatgagttacttggctgggtgacaaaaacgaaagatagatatattatagaagatgaatatgacagtgaacttagattgaatggtaagccaattccatcacttcagagcattgatgtatcgggaaaagtgatttatatgaatacattttccaagactttgtgttcaacagtgcgaatcagttatatggtgctgccggatgaattggcagaacgattttacagagaactttctttttattcctgtacggtatcaaattttgaacaatatacgttagcgcagtttatgaattcaggggcatttgagaaacatattaaccggctgcgtaattattatcagcagaagagagaccggatcctggaagcatttttacagggagtattgaaaactaaaatcaagattctggaagaagatgcaggagtacattttttaatgaaagtagatacaaacctgagtgaagaagaatttctggataaaatgaagagcaaaggaattaagctggctgcattgtcatcctattatcattcaagtgagaagaagaaaaagtatgaaaatatttatgttatgaattattcatttgttgattgtgaaaaaatggaatatgttgcaaagatgataacacaagtggaatgacatggagaaaagtatggagggagaaagataaaatgactttgcgaaagaagttaatgctctctttatttattcaaccgtggaatgcactggcaagtgcgtacgatttgatttataatgtatgtggaatgcttggagcgttgctgggacctatctcgggattatatctggtatcctatctgtttgagcataagacagagattagaaacagcactcatcaggcacaaaaatcaccgcagctatggaaagcatagactgcggtagaagtataactgaaactaagagaggagtggaaggaagtatcatgaaaacacttgtaaaaaatggaatgatcgtatcaacggaggacacttatgaagcagatgtcctgattgaggatggtgtgatcgaatgtatcggaaaaaacctggaagcaaaatttggggatacagataaggtgatcgatgcgaaaggaaaatatgttctcccgggaggtattgatgttcatacgcatatggatattgatgtcggaatcgcgagagcagtagatgatttttatacaggtactgttgcagccgcatgcggcggaactacaacaatcgtagaccatatgggattcggaccggcaggatgcccgctacatcatcaactggatgtatatcatggactggcagacgataaagccgttatcgattatggattccatggagtagtccagcatgtagacgagtctattttaaatgagcttgagacaatgatggatgacggagtccagagcacaaaggtatatatgacttatggctataagattgatgatgatggtattttagaagttcttaagaagatgaaagaactgcatggaatcacagcattccattgcgagaatcattatgtggtagagcatctgaagaaagaatatggtgatgccggaaagacagcgccgatctatcatgcaaagagcagaccgaatcttgcagaagcagaggctgtaagaagagtcctttatcttgcgaagcttgcaggtgatgcaccggtgtatattgtacatctttcttgtaaggaaagtcttgaagcagttgaagaagcaagaagaaacggacaaaaaaacatttttgttgagacatgtacacagtatctgacacttacagaagacagatataaagatccggatggattgaaatatattatgtctccaccgcttcgtacacagcaggatcttgatgcgctgtggaaaggattagaggcaggagagattcagatcgttgcgacagatcattgtccattcaattatgcaaaagagaaacaggacggcaaggatgattttagaaaatgtccgaatggagctccgggagttgaagaaagaatgattcttcttttctcagaaggtgtaatgaaaaacaaaatcagcatcaacaagctggtagaagttgcctgcacaaatccggcaaaggtgtacggaatgtatcctaagaagggaattattgaaccgggagcagatggagaccttgtgattattgatgctgatgcaaaacagacactgactcacgagatgatgcacggagctgttgattatacttcttatgaaggaacagatctgcacggaaagattgatctcgtaatgcagagaggaaatatcattgctgaaaataatgaatttaaaggtaatcgaggagatggaaagtatctctacagaaaaccttttttaggagatttataatcgaaagtcagagaatctgaaataataagagaacccccaaaacagaacctttcacggtaatgttttagggggctttttgtagttatatatattagaccattacattagatcagatgtgtactttcaagcttctccataaatgcgtcgttcatctttatgatcggttttctgagcagaagaccaagcagcaatgacggtgcaaggaagattgccagtttgccgagctctgtggcataagttgttccgtagaatcctgcaatacattcacgcatcgcattcatgctgtgtgtgaacggcagaagtggataaacaacctggaaaaacttcggtgcacactggatcgggaatgttccaccacttcctgcaacctgcattaccatcaggacaacggcaattgctttaccgatatctccaaaggagacagtcagtgcatagatcagattcacatagacaaagcttgtgaacataccggttagtacaaacattaccggatgcttacactgaataccaaggaagaaaagatctccaagacagatgagtgcactttgcatgaaaccgataatgatcagaagtaggatacgtccgatatagagctgatattctttcggatggaatagtttcttctttgtggaatcagctacagtgacttttagcatggcagccataacaacagcacctacccagatcgcaagagtggagtagaatggagtcattgcagacccgtaattttcaattggataaatctttttctcatccagtttgactggggaggagagaaaagatgaaatcgtttcggagtcttcggataacaggtttgttacggcagccataccttctgaatcatcagtggaaagttttgtagctacagccgtcagtttttcagaagattcttttaacagagcagcagaattagtaagtgctgtctgaagtcctgtaagtccacttgaagcagaaccggtaacgttagcaatattttcaatgctgctgtcaaggcttccaagcatagaggagacagaacctgttgtagaattcaatgaattggaaagattatcaagatttccttttacattttgttcgtaagttgtctcaactgccttgacggaagaagttgcttcgccgatcagactatcaagttcactctttaatgtagtagcatttgcggttgctgtagtgatcgaagttgcagcaccgttaattttatcacggagtgcagtctgtcgttcaattgccagctgaatctgctgattgattccattgaccgcattttgaatctcaggataatctgaggaggcgtctgcaatagcagataatgcagcagaaagctgattatacccgtcaatgacattctgtacgcggctacttacggaagacaatgcatttgctgccgcctgtgcatctgagttgtaggaacttaaagccttgtcaatagtatcagagacagcagtgtagaagcttgcattctgtgctaatgcgtcagaaatcgtgcttgtagttccggacagggcagcagttaatgaatcaattccggaatcagaattctttaaggaattgaggctggtttttgtgccggaaccggtttcctgaagaaattctgttgttgtgttcagcattgtaactgcagagtttgtcatgtctgagaaggactgaacagttgcagcaacagttccaagatcagatcccatctgattcaaattactactcatattgttgatcagagaatcatcccctgtcttctttgcgattgaatctaccgtctgaaatgcattaagtgcggtctgggcaattgtctcaatgaatgtctgattaatttgtttctggacagccgttgcgccttttccggtaatgatcggagcaatcgcattttctttttcattttcataataagtcagatccggatgttcagcttcagaagagaagacactcatcattttctggctaaagtcttcagggattacgatcgcagcataatattctccggattttacacctttttgagcatcttttgaatcagtaaaaacccagttgaactgagaatttttatgcagagaagagaggatctgctctcccatgttgatctttacggcaataagatcactttcataccctttgtcatcacttgcaactgcaagttttagcgcacctgtatttccgtaaggatcccagcttgcggaaatgttaaaccatgcataaagagtcggaattacagtgattcccataataacgaccattgcgatgacatttttctggatcttcatcagatcatttttcaggattaaaaaaatatttttcaaattattccgcctcctttccacggaagttttcaagcatttcttcataagacatgccggcaagttctttctgttcttctaattttgtatgaatgtattctacaacgatcaaccatactgagatcgcaataatggaaatgatccataaagtcaggaatacaatctttgattcgagactgaacatcaggatcaggaagatcagagggatgatcgcaatggcaaggaagccgatacgaatcatcttatggtaattgttttcaaatttttgtgcccgttcagctgttacaaggcgaaggtcttcgatggaaagagatgcctgtaagagcatggagagctgtgtacttctgctaagttctgcttcgtgaggttcgcacatcataaattctgtctctgccagtttcttgtcgaacagatggttcagtccggaaagagccgggcgaagtccaagtccaataagcagagagatcggcacgtagcacaggagcaggatcagaagatcattgcggaagttagaaccgtagaaaccggcgattgcttcacgcatagcattcacaccatatgtaaatggaaggagtggatgcagtttctggaaaaaggctggtgtcatctcaatcgggtaggttccggaagaaccaggaatctgcaggattacgagaataacacagagcgctttaccaatatgcttaaatgtaagtgacagcgcataaataatatttacatagacgaaagagcaaaccattcctgtcaggatgaattgtgccggatgattgcattggactcccggaaggagtgtatcaccgaggcagacgataaatccctgaacaagaccaactgccatgtataagagccagcgtccaaagtataatgttgtctgtccgtaaccgcgcatggattcgtctttgtccacttccagcttaaagattgcgatcagtacgataccgccgacccagattgcaagattagagtagaacggtgtcatagaagaaccgtaattatctacggcataataagtctccgttttaatctccacaggagaggacataaatgatgagatagattctgcatcaatgccttcaagagagagcagtttttggtatgtagcagagcctgtcagtgcattcagatccgtctgaattgtacttagtttgtcgcttacggcacttaaagattccttcgtactgtcaaggagggcagttgtatttgacaatccactttctaactggtcgagcatatcattgatctgcttagaagtagccggtactccgtttagcattccttctacctgaccggtcagtgtggaaaatgtatccagtgtctgtccaagcagtggaagaatattctggtcaaatgtagaacggaaagtgtgcaggttattgatactttcttttgtcagagaagtaagctgttcctgtgttgcagttgttgtatcaatcgcatctttgattccattatttccagtctgaagactattgatcaattcctgatttgactggttctgagtttgcagggcagaaatctgtgcattgatctgatctccgatcgttcccggaaacttattggcaagttcctgcatttttttaagaatatctgcattcagttcattgactgagtttgcataaccaagcgcatcactgacagaagtgttgatctttccggctacggtagcaagttctgtcagtcctgtggatgttgagctgcttgcctgaccaagtaaaagttctccgtcagagagggacttagaaagtgcggaagaaaaatctccggcagaagaacgtgtcgtattcatgacagagtcagcactggacaatgcatttgctccggatgttgctacatctcctaaagatgtagatgcttcttttgcattctctatcagctttgaggtattggatgagtctttactgaacttttctagaagctgttcgtattctttgatattattatttgcttttgtaagcagatcattaatctctgcatttgttgaattaacagagtcggaaatgttgaatacagaatcctttaaaatctcggcaattgtctcagatgcaacagaggaaaaggtgttattaacctgtgtttggatcgtgcttgcacctgaactggtgatctttggcgcaattgcattgagtttttcattgatatagtattcaagttccggagtttcaatctttccggacaggacacttagcagggattcgctaaaatcttgcggaataatgattgctgcataatattcaccggatttgactccttcaatagcagcatctttggaaacaaatgtccatcctaattggtcgttttcctttagttggtcaataatctggctgccggcattgatcgtcagatcatcatgtgtggcatcggtgtccagatttgctactgctaccttgatgccggaagtattggcataaggatcgatatttgctgcaatattgaaccatgcgtagagtgaggggagaatagatactccgatcaaaacaagtattgctgccggattacggagcaggcgtttcatatcgcggcgaaaaatccgaaatgcgtttctcatggataaaactccttttcttaaaaatatttctagtaatagatacaatgttgattttcatgtcaaaaagtattatattaatgtagaaactaatttacaaccattaatcaacactggatatgtctaataatagacgaaagattgaaaaatgtctagcaggtggagaaaatcatgttactgttcacacgggagtgaacagtaacaaaatcattcatttaagtcatagaaacagagtagagagttattggtcagtagtactgtaagttataaaggggggaagagaagatgcagaagaagacagatcgcagagtcagaaagacaaaaagtcagcttaaaacaggtcttgctcaattgatgagggagaagagtatcagagagattacggtaaaagaattggtagatgcggtggatatcaatcgttctaccttttatctgcattattctgatataccggggctgcttgcagaagttgaaaatgaaatgatggaagagatgcagcgcgcaatccgtgaacatccaattgatccgggaaaagatagcgtttactattttattcaggatttatttcatgtgcttgatgaaaatcgtcagattgcaagtgcgcttgtaggaccacatggggatattggttttgtacataagttagagcagcttttagaggaaaagagtcgggagtcacttgcagctcttgtaccggagaaatcaggtgaaatgaaatatttttattcttattgcctgaacggttgtctcggttttgtgaaaacatggttggaaacaggcgaaaaggaaacaccggaatatgcagcagagatggcttatcgaatggttgtaagttcagttacagcattttatgacactaaagaaggaagagaggacaactaagaaatgaaacgagaaaaatttggctcacgtctgggatttatcctgatctcagcgggatgtgccattggcttgggaaatgtttggcgttttccgtatattacaggaaagtatggaggagcagcatttgttctgatctatctactgtttcttgttctgttgggattgccaatcatggtaatggaattcgcagtgggtcgtggaagtcaggcaagtattgcactatcctttgaccgtctggaaccactgggaacaaagtggcactggtataaatggtttggaatcggtggaaactatcttttaatgatgttctacacaacaatcggcggatggcttcttctatatacaggaaagatggcaatcggagagtttaaaggacttgatgcggatggtgtgaccggagtatttacatcacttcttggacagcctgttacaatgacaatctgtatgatccttgttgttgtgctgtgctttggaatcgtctgtatgggacttcagaaaggtgtggagcagatcacaaagaaaatgatgatccttcttttcgtgttgatgatcattcttgcagtgcgttccgtgacattgccgggagcagagaaaggactggagttctatcttcttcctgattttaagaaagcagcagaagcaggattgaaagaagttattttcgcagcgatgggacaggcattctttacattaagtcttggaatcggtgcgattgcgatctttggaagttatatcggaaaagaaagaactctgacaggagaagcagtctgcgtaacagttctggatacattagttgcattgattgctggatttattatctttccggcctgctttgcatttaatgtccagccggacagcggtccgagtctgatctttatcacacttccgaacattttcaatgcaatgagtgcagggagaatctggggaacaattttcttcctttgcatgtttttcgcagcatgctctacgatcattgccgtgtttgaaaatctgatcgcatttgtgatggatttaacaaattgttcaagaacaaaggcggttgtgggaaatctgatcgcgatcattgtactttcccttccatgtatttttggattcaacatatggagcggcttcatgcctctgggagcaggaagcagtattcaggaccttgaggactttattgtaagtaataacctgcttccgatcggaagcctgatctaccttctgttctgtacaagccgctatggttggggctgggataagttccagaaagaagcgaatgcaggaagtggaatcaagttcccgggctgggccagattctatgtatcctatattctgccattgatcgtattatttatctttgtgcagggatattggagtaaatttgttggataaaacaataacaatattgtgaaataaaaaacgctataataaccagaaattcattgccattctattagtgataagttataatttaactaatggttttgcaagagatttacaactgttccaaacggaaagaatacgtttcaatctgaatgcagcagagagatatctcatagcaataaagacatggattttgaatagaatatagactctgacggcaaggaagtaaggataccgagcgggaatagttgtaaagaagcgtttagacaaaaaaatattttgtgattttaacagactctttttccgttggggaagaagggtctttctctttaccagggaaataaaatgggaggatcagcaatatgttaaaggtagcaatttacggaaaaggtgggattggaaagtccacgattacatcgaatctggcagcagcatttgccgctatggggaagcgcgtaatccagatcggatgtgatccgaaagcagattcaacgatcaatctgttaggcggagagccattgcgtccggtaatgaattatatgagagaagaggatgaggagccggaagaattagatcagatcgcaaaggaaggattcggtggtgtgctctgtatcgagacaggcggaccgacaccgggactaggatgtgcaggacgcgggatcatagcgacatttcagttattagaagacttgcgattgtttgagacatacaaaccggatgttgttctgtatgatgtgcttggggatgttgtctgtggcggatttgcagcaccaatccgggaaggatatgcagagaaggttgtgattgttacatccggagaaaagatggcattgtatgcggctaacaatatttccagcgcagtgcgtaactttgaagatcgcagttatgcaagaatttttggattgatcctgaatcatagaaatgtggaaaatgaaacggagaaggtacaggcatttgcagaagaaaaaaagattcctattgttggtgagattccaagaagtgacgagattatacgctgggaagatcagggaaagactgtgatcgaaggcgacgcagattctgagatcagtaagagattctttgaactggcagaaaagctgttagaggatgaaacagaacgtgtgagataaaatataagtcgagggaaaatatatgaagaaagcatatttttgtacagcggaagaactggaacaaagaggaaaggataatcttccgaaacagtttcagtcagtggaacatttaatctatagttcgccggctacgcttgcctttaactctccaggggcagaagggttcggagtgaaaagagcaggacttgcagtgccgggatcgatcatgctgatcgtggcaccggggtgctgtggaagaaatacgtccatgatcagttcaatgaaagaatataataaccgtttcttttacctttgcatggatgagactgatattgtaacagggcgtcatctaaagaagatcccgaaagcagttgcatcaatctgtgaaagtcttgataagaaaccatccgttgtgatgatctgtattacctgtgtggatgcccttcttggaacagatatggaacgtgtctgtagaaaagcggaagaaaaagccggacttccggtgcgtccatgttatatgtatgcattgacacgagagggacgaaagccaccaatggttcatgtgagacagtctctgtattcacttcttgaaccaggacataaaaaaggaaatgtagtaaatctgctcggatacttttcaccactcgtagatgactgtgaattatatacactgcttcaagaggcaggtgtgaaaacgattcatgagatttcgagatgtgaagattttgaagaatataagaaaatgtctgaggcaaattttaatcttgttcttcacccggaggcacgatttgcagcagaggattttcatgacagattaaagattccatttatcgaactgcgcagactttatcagattgataaaattggaagccagtatcaggcatttggcgcagcacttggaatagaatttcatgcagaggaacagaaaaaacaggcacaggaagcaattgaaagttttcgtaaagtctgtccggacccggtatttgctgttggggaatgtgcaaatgcggatccgtttgaattatcattagcattggtgaaatatggatttaaagtagcagaaatctacggaacgattactggggagaactttatttatatcagacagttgaaaaagttaagtccgcagataaagattttttccaatatggaaccgacgatgctctattatgatccaacggaaagtggcgtgacactgacaatcggaaaggatgcctgttattatcatccgaacacaaaaggaatccattggaatgaggagagacagcctttcggatatgcaggcgtgagaagactgtttgaggcgctggaactggctgtgacagaacaggcagaaggtaatgttttgcagaaacaggtggaagtgatcggttctaaatcacaagaagcaattgcagagcagagtcaagaatcactgttcaaagaggaagtggacaaaaaagaagacgtttatgtacgtggcctttggaaaggactgactccatttgcaccggatcagtcaggtgcagcgtccgttttctatgaactgggaggaattcttgttatttgtgatgcgggaggctgtacaggaaatgtatgcggattcgatgaaccgcgctggttcggggaacgtagtgcgattttcagtgcgggcttgcgtgacatggatgcaatccttggaagagatgacaggcttgttgcgaaacttacggatgcagcagagaagattgatgcaaattttgcagcggtgatcggtactccggttccggctgtgatcgcaacggattatagagcattacagagaatgtgcgagaagaagacaaatcttccgattctgactgtagatacgaacggaatggaactgtatgatgtgggagaagagaaggcatggctgactttattcaagacatttgcaggaaaagatgtagcatcacagaaggaagcttcagaagaagacgattcttctaaaaagatgaaaatcggagttctcggtctgacgccacatgatgtcagtgacctgaagatagaagagaagtttcggaaatcagaaaatgagaatacgcattatatttgctatggaatgagagcaggtattgataaagtaaagacagcaggctctgcagataagaatctggttgtagcaccgtcggcactcgagacagcaaaatatctggaaaaagaatttggcacaccgtatgaagtgggatatccattcgtagatgaattgatacctgaacttggttatgaaaggaaaaagatactgatcattcatcagcaggtgattgcaaatgccatcagacaggaaattcgtacaagaagtgatgaacagaatacagaagttacggtggcaagctggtttatgatgaaatccgagctttcagaagaaggagatctttcactgaaagaagagatggattattgtaagcttgttcaaaatgggaactatgacattgtctttgcagatgaaaatatgagaggcctggtaccgggattcaaaggaacatttgttaatatacggcattttgcagtctcaggaaaactgcaggagtcataacgggaggaaaaagtctatggagaaggagataacgaagaaaatccgtgtctatggaattgtacagggcgtaggattccgtccgaccgtcagtcgacatgcagattcctgtaagatcagaggaagtgtcagtaatcgtggaccttatgttgaaatcttcgcacagggaagcgagacggcagtgaatctgtttattgagaaagttcgtacctgtccgccaaaacgtgccgcgattcttaaagtttcagaagaaatactggatacaaaggaaaaatatccggacttttctatcatagaaagcgagaagacaaaaggagagatctttatttctccggatattgcaatctgtgaggaatgtaaggaagaattgtatgatcccaaggatcgcagatacttacatccgtttattaattgtacgtgttgtggtccgcggcttacgattctggatgctcttccatatgacagagagcgtacgagtatgaaagaatttccgatgtgtccggaatgtgaggcagaatattacaatccggaaagcagaagatacgatgcgcagccggtttgttgtaatatgtgcggaccggaagtttatttgatcaaaacttctgatagaacgatagacatgaaaggttctgatgcaattacggaagcaagaagagtgatttccgaaggcggaatcgtagcagtgaagggaatcggaggatttcatctttgctgtgatgcatcaaatgaggctgcagtggaactcttaagaaagagaaaacgccgcccggcgaaaccgtttgcagtgatggcaagaaatcctgatgtagtgcaaagtgtctgtgagttgagtaaggagcaggaagaaattctcactggacatcagaagccgattcttcttttggtgaggaaagagatagaaacgaagcagctgtgttcatctgtcgcaccgggcaatcccaaagtaggagtgatgcttccatatgcgccggtacagttacttctatttcaatatccggatggaatcaaaatgccgaactttctcgtaatgaccagtggaaatgtatccggtgcgccaatttgcagatcggatgaggaagcactcgaagagctttcggaattttgtgactgcatcttgtctcacaatcgaaaaattcgtgtgagagcagatgattccgtgatggatttctataaaaacagaccatatatgattcgcagatcaaggggatatgcgccacttccgatccagacgtcaggaaaatggaaaggacaggtattagctgccggcggagaattgaaaaatacattctgtatcggtgtggatagtagattttatccttcggcttatgtgggggacttagaagatttaagaacggtaaatgcattgaaagagacaatacagcggatggaaacattgttagaagtggaaccaagcgttgtcgtctgcgatatgcatcccaaatataattcgacggtggttgcggaagaactgggacttcctgttttgaaagtgcagcatcattatgcacacatcttatcctgtatggcagagaatgactggatggaacaggtgatcggagtatcttttgacggaaccggctatggaacggacggaaccatatggggtggagaaatacttctggcagatcttgacggattccggagaatcggaagtattgaaccatttttacaggctggaggcgacctatcagcaaaagaaggatggcgtatcgcagtttctttaatctggcaaatatctgaatcaaaagatgaggcgatgcagattattcagaaacttggtctttgcgaggaaaaagaagcgaaagttcagcttgcgatgcttgagagaaagatcaatgcggtagagtcaaccagtgcaggaagattatttgatggaatcagtgcgatacttggaattcgaaagaaatcttcttttgaaggagaagcctccatggcattggaattcgcagcagaagcttatgaaaaaagatctggtgagaagaaaataaatgtcttagacgggcagaagtgtttaactgaatcagcagacgacggaagagaacttcttctgacaagtcgactggtgagggcagcagtcgaagtggttagcaatattggcgaaaatgcagtggcagaagatacatttgatcaggacttaatagaaaaggcagcttatgaatttcataaaggactcgcagagcagattgttgcagcgtgtgtccatgctgcagagaaaaccggatgccggacagcagcgcttagtggcggtgtatttcagaatggattactgcttcgtctgacggaagacggattaattgcaaatggttttcatgtgctgacacatcagatgattccgccgaatgacggaggaattgcgcttggtcaggcattttatggaatgaatcatgagtgtgtagaggaagctccgattttatagagttaaaaaagaaaggaataagaaaaatgtgtgtaggattatcagctaaagtggttcgcatcagtgacggaactgcagtggtagatgcaggtggtgcgaaaagggaagtatcttcagagttattagaagatctggagccgggcgattacgtgatggtgcatgccggagtcgcaattgcaaagatcacagaagaagatgacgaagagaccgatcagcttatggaagaactgctatagagcagtgaacaatggggtgaaaagaataaatgatgatgcaggatataacaaaaaatcaaacatctgaaagaaatgagaaacaaagaaaaacagcgagggaaatcatcgagcagtatgatggaccaccggttcgcattatggaagtgtgcggaacacatacacatgagatctttcgccttggaatccgcaaattacttccaaagcaggtggaactgatctcaggaccgggatgtccggtctgtgtgacaccggttgggtttattgatgaggcagtgtggcttgcacttcaagcaggtgtgacagtctgtacttttggcgatcttgtccgtgtaccgggaacaaagatgagtcttgcgggagcgagagaaaagggcgcaaagatccagattgtttattcaccggcagatgcagaaaaatatgcgaggttacatccggaggaacaagtcgtgttcctgtccgttggttttgagacaacaacaccttcttcttgcttatcagtaaagaaagcgaaagaagaacaactagagaattattctatcctgacggcaaataagacgatgccgggagcttatgaagcattaaaaggaagtgcagatgtgtttctttatccgggacatgtaaatgcaattaccggaacggcattgtgtgaatctctgacaaaggagggagtcagtggagttgtagcaggatttactgcgaaagaactgctgacagcattggctgtttcattgaaacgctaccaggaaggaaaaccattttttgtaaactgctatccaagagtagtaacagcagaaggaagcaaagaggcacagcgtcttgtagatgaactgatggaatcctgcgacagtgaatggcgtggtcttggagtgattccagattccggaatgaagcttcgtaaagagtgggaaatgtttgatgcaagagtgaaatatcagattccggaaatggaaggaagagcaaatccggcttgtcgttgcggagatgttttacagggaaaatgtaagccatcagattgcaaagtatttggaaaagtctgtacaccgcagcatccggtaggagcatgcatggtttcaaatgaaggtgcgtgttccgcttatttcatgtacggagtatagaagaaaatagaaatggttactgtgaacagtgacggaaaaagaggaaataatatgagcgaaaaaatagaaagccagacagttacaatggcacacggagcaggcggaaaacagacttcagaactgatcgacaaagtatttgcagcacattttgcaaatccggatctgacagcagatgatgcagccgtattaaatccgccggttgggaaaatggcagtgtcaacagatggatttatcgtatctccggcatttttcccgggaggaaatattggaaaactgtctatctgcggaacagtaaatgacctggcctgcatgggggcaaaaccattatatctgacttgtgcatttgtgattgaagaaggattcccaatggagaaactggagcagattgcggaggcaatggctaaaacagcgaaagaagcaggtgttcgcatcgtatcaggagacaccaaggttgccggaaaaggacaggtagacggagtctttatcacaacaaccggaatgggacaaattgaagatggcgtacaggttggcggagaacttgcgaagccaggagatgcagttatcgtaaccggagatatcggccgacatggatgcacgatccttcttgcgagagaagatttcggaatcgaggcagatgtgaagagcgattgcgccccactttggaagacggtggaggctgttatggacacgacacatgaacttcatgtaatccgtgatgcgacaagaggcggtgtcggaactgtattatacgagattgcaggacagagccaggttggggtacagatcgatgcagcaaaaatcccggtagctaccgaggtgcagggagtctgtggaatgcttggacttgaaccactttatcttgcctgcgaaggaacaatggtgatcattgctccggcagaacaggcagaaaagattgtagagacacttcaccagtgtccatactctcaaaatgcagcaatcatcggaacaatcacagaagaaaacccaggcaaggtaatacgcatgacagaaataggaacccagtccctcctcccacagccaggtggagagttgttgccacggatctgttaaaccagttccgaaatgcggagaaagttgtttcttcatgcgctgcaagctagcttgcataagcaagaagagacaactttctccatatggcgaacgccatacagcgaaatgaagcgtgagcggaattgagctgtagcatgaggaacggaagagagcgatacagcgaaatgaagcgtgagtggaattgagctgtggcatgaggaacggaagagagcgatataacaaaatgcggagaaaggaatcgaaatggatacaagagtagcagtaatctccataattgtggaaaatccggaagcgatcgttacactgaatgatcttcttcatgaagccggaaattatattatcgggcgtatggggattccatacagggaaaagggaattaatatcatcagtattgcaattgatgcaccgcaggatatgatcagcagcctttccggaaagatcggaagactcaaaggtgtgtcagcgaagactgcctattcaaacatcattacaaaagcggaggcacagaatgattaaaattgcagtatatggaaaaggtggaatcggaaagtcgacgacagtctccaatgtggcagcagcactggctgagcagggattaaaggttcttcagattggatgcgatccgaaggcggattctacgatcctgctcagacatggggaagaagttccgaccgtacttcagatgtatcaggaaaagaaacagaacctgaaactggaagatattgtgaaaattggatacaaaggaattgtctgcgtagaagcaggcggcccgacaccgggacttgggtgcgcaggacgcggaatcataactgcactggaaaaactcgaagagacaggtgcatatgagaaataccagccggatgtagtgctttatgatgtgctcggagacgttgtctgtggtggattttctatgccgatgcgaaatgggtatgcagacaagatctttattgttacatctggagaaaatatggcgattcatgcaggtgcgaatattgctatggcggtagaaaactttaagaatcgcggatatgccacactgggagggctgatcctgaatcgaagaaatgtcctgcgtgaggaggagaaagtagaagaactggcagaagattttcatacaagtatcgtaggaactttgacaagaagtgatcttgttcagcaggcagaagaacagaaaaagaccgttcttgaagcatttccggaaagtgaaatggcagaagaatatcgcatacttgccaaagcaatcctgatgaaagtgagagaaaaacaagaggtgtcaaatgcttagaaaagttggagaatcagcctggccgatcagtgagaaagatgcggttgtcagcataaaagacgcatcctatccaattccgttcccacaagggctggaatttaattcaccggcacatggctgttggaatatcgttcatactggaatgctgattccggaagcacatcagatttatgtctgtgcggacaactgtatgcggggcgttgtgcttactgcagcagagatgtgtgaagaagatagattttcctttgtgatcgtagaggagcagaacttgttaagcggaaatctggaagatgtgacgattgaaggaacggcagatattttaagaaaactaaaagaacgcgaggaaaagacgggacagaaaatgccgaaggcagttcttctgtttacagtatgccttcatcattttctcggatgcgatctggagcggatttacagggaactggagcaacgatttccagaaatcagatttttgagatgctatatggatccaattatgcaaaaacatggaccaacaccggatcaaaagcttcgaaaagcaatgtatgaaccactgaatcctgatcggaataaaatggatacaaaacagatttccatattggggagtgactttgcgttagatctaagctgtgatttaaaggaattgctagctatagcaggatataaagtcagagaattgcaagattgcagcacatgggaagagtatgaagaattgggaaatgcgggaacatttctctgttgttatccatctggaaagtatgggattgaaacactggcagaaagattaagaagagcatttctttatctgccacttagttttgattatgaagaaatcagaagcgaagaagagactttgtggaattctttgggagtggaaggaaagcagattctaagtgaatggatggaaaagaaaatcgcactttgcgaagaagcgttaaatcatgcaaaacaaattattggaaatgctccaattacgattgattatactttccatccgcgtccacttggactggccaggcttttgctgatacatggatttaacgtaaagactgtttttctggacagtataagtccggaagaaaaagaagtatttgaatggctgaaagtaaatgcaccaaaactggaacttcgtgcgacagttcatgcaaagatgcgtgtactgcatgaagcgcatccttcggaaaagacacttgcaatcggtcagaaagcagcgtggtctacaggaagtcattactttgtaaatctggttcagggagccagcctgcaaggatttgacggaatccgaaggacagcggaacttatggaagaagcatttttgaataaaaaagatccgaaaacaatgatcgtaagaaaaggatgggggtgcacaagctgcatatgagacaatcgtatcgaatcataccgatttatacttcagatgtatcaggtgtctgttctgcactttatgagttgggaggcatggtcgtgatgcacgatccatccggctgcaattctacctataatacacatgatgaaattcgctggtacgatcaggatagcctgatttttatttcaggtctgacggagattgatgcggtcatgggaaatgacgaaaaatttttatcagatatcaaagaagcagcacgtgaatttcatccgaaatttatcgcacttgtcagttcaccgattccatttatgaatggaaccgattttccggcactggcgaaagtgctggaaattgaaacaggaataccatcctttgcagtgccgacaaatggaatgcatgattatgtatatggagcaggaatcgcattcgaagaaattgcaaaaagatttgttacagaaaaagaaacgagagaaaactatgtcaaacggatagtaaacctgcttggaataactcctcttgattttggcccgatttcaaaagtagaagagttgaaaaagaatcttgaacagtatggatggaaaatcatttccacatgggcgatgggagatactttagaagacctttccaatgcaggaaatgcagaagtaaatcttgtcgtatcatctgtcgggcttcgggcggcgagggcattgaaagagaaatctggaacgccttatgtgatcgggacaccgtataaagaatatgcagagagaatcagtgaagctttggaaaaacgcatccggcttcctgctttagaagatcgggaaaaagaaaatttacagggaaccggaaattctgaaaaaataattactctgatcggtgagccggttacaacaacatctcttgcagctttaattgaaaaagaatatcactataaaacaaaggttctttgtccgttagaggaaacggatggactgattggaagtcaggatttaaaagtatgcggtgaagaagagatggaagaggcactgaaggatgcgcaaattgttgtagcggatccattatatcgcccaatctgcccggctgagtgtgagttttatgagagagcacacatagcattttcagggagaatgtttctaaaaaataaataagtagggaatggcctggatttttgaattgttgttttgattcctatggatccaggtcgatttttatcattgacagtagcagtttattttgctatagttaatccacatcaaaatctcagacatatatttctatatttcatttgtctgaacatgttatcgaagagataacaatatctcattttcaaggctatatcagcatgagattccatttttgatgatttaaaaacaaaagaataaaaatcagggaggaactgtctatgggaaaagcagatgttaatgtcaatatctggctaagtgaaaaaaatcgattcgcaaatttatttaatggtgtgatttatggtggagaggatgtgatattgcctgaagatttagaagaggtaaatccagtctcatctgttaatgtgaaaaacagagtaggaaaaacgaaaagtatgaagaaataccgggacattattatgcgatggaagagccaggcgacgcttgtacttcttgcgaatgaagcgcaagataagattcattatgctatgccacataaagtgatgctttatgacggaatggattatgaaacacagattcgaaataactgggaatgttttacagaaggccaaaggcaggctaaaaaaacaggacagacgttagaacatcttacagctggagaatacttatctcgttttcgaagaacagaccgattaacgccgattatttcgctcgtattttattatggatcagaaccgtgggacgggccggtggacttatatgacatgtttcgattagaaggaacggaaaaagaaaaagcaattcttgaaaaatatcttccaaattatcggattaatctggtagatgcagaacgcttagaggaaacagagaggttctctgaggatttacaagtgatattaactatgctaaaatatagaaaagataaggatggattaagaaactatgttaatgaaaataagcaattctttcaaaaggttgaccatgagacaagtcaggcgatgaaggcatttttaaacatgaaacatataccaggtgaaaccgagaataaggaggaggcaatcaatatgtgtgaagcaattcaggaaatgtatgacgatggcgtaagagatggaatgcagcaaggaatccagcagggaagggatgatctgttaaaggaaaaagtaaagagaaagctgcagaagcaaaaatcacttgagcagatcgcggatgaattagaagaagatgtcagggtgattcggaagataataaaagaagtacagtgatacagcatttgcagattcttgttaccggaccgacaggaagttttgaattatgaaaaaggcgggatgacagatcaatactgtcaccccgtctttttcagataccatttttctatcagaccgattatcgcatacaacagcactgcaatgatacatagaatgcagatactcatcagaagccagtcaagtttaaatacctggctggaatagatgatcaggtatccaagtccgcttcttgcggctagaaattcaccgatgataactccgacaagacaaagtccaatattgactttcatattactgatgattgccggaatggaaccaggaagaaccaccttggtcagcgcatgcctgcgttttccatgtagtgtgtagatcagacgaattttttcctggtcgatcgtagaaaaactggtgtagaggttcaggatacttccgaaaattgcaacggacattccggcaacaacaatggttgtggtattggcacccagccagacaataagtaagggcgccagggcagattttggcaggctattcaggacaaccatgtaagggtcaagaatttcggagagtccatggaaacaccagaggaggattgcaatcagaatgctggtaagtgtgaccagaagaaagctgacaagtgtctcatacaaggtgattccaatatggtgaaagacagaaccatcctctgtcattttcagaaaacaggttacgatacgggaagggctgctgaagataaaggaatcaacaactccggtatcggcacagatttcccattgtaacaggaataagaaaagaatcagaatccgcagaaaaacgaccatccgtcggcgtctgcggatttttttgagaaaacgaagatgctcagttgtcatggtttagctccttccagatttgattaaagtagtgtttgaattcaggtgcattccgccgatttaaaggtgtgtcttgttctaatttaaagaaaatcggaatttcgcaacggacgttggcaggacggttggtgaggacaatgacccggtcggaaaggctgattgcttccgatagatcatgagtgacaagaagtgcggtctttccactctgtcggataatctgaccgatgtcgtcgctgacggtcagtctggtctgataatccagagcggaaaagggctcatcaagcagtaagagttgcggatcaggcagcagagtccgaatcagggcggcacgctggcgcattcctccggaaagctgggagggacgtgcagaagcaaattgttttaaaccatattgttcgagaagctcatacgcacgttttttggttgcagtattcagtgtgccgcagatttccggaccgagggtgacattccggtaaatactgcgccagtccagtaaatgatcgtgttggagcatatagccaatcaggggggaattttccttgagagggataccatttaacaggatttctcctgcatctggcttcatcaatccacagatcagggagagaagtgtagatttgccacatccggaaggaccgacaactgctgtgaaggttccaggttgcacggaaaaggaaagatcagataaagcccttgtttctgcgtccaatgtgtgataagaataatatatgttatgaagttccagaagagaattcattgaagactccatttcagtagtagttaatgttatgatatgtaaaaataatcctgagagtgaatcaatgaacatgtcaggcgttttagaaaaaaggaatgattgatctggaacaaagatacaggagaatgatgaaaatgaacttacagaaaataaactatcagaaagaactagagaagcttctgacaagactggaaaaggaagaaaaagtaccaactcttttactacatagttgctgcgcaccgtgcagtagttatgtattagagtatttatcacagtattttaaaatcactgtcttctattataatcccaatatttatccagaaagtgaatacacaaagcgtatcctggaacaacagaaattgattgaagagatgcatttccggtatccggtatcatttttagccggtaaatatgaccgcgaccggttctatgagatggcaaaaggactggaagaagtgagagagggcggttccagatgcatgggatgctatgaacttcgtctgaaggaatccgcagaaattgcagtggccggaggattcgactattttacaacaacactcagcataagtccgatgaagaatgcgcagaagttgaatgagatcggacaacgtgtcggtgaagaatatggtgtacagtatctgctttctgatttcaagaagaagaatggatataagagatccatcgaattgtctggaatctatggtctttaccgtcaggattattgtggatgtgagttctcctataaagcacgtcaggcagaaaaatgtgtgtgaaatgacggaagaagtgattaaaatagcagaaaataagaaaaaatctacagaattcgtcgaaatcaggtatattttgcaagtttgtagtagacatttgacactttagtgtgataaactaatgggcaaatacgatataatagaaaaggggaaagacagatggcacagttatggggcggtcgttttacaaaagagacagatcagctggtttataattttaacgcatccatctctttcgacaagagattctatgagcaggatatccgaggaagtattgcacatgtgacaatgcttgcaaagcagggaattctgactgaggatgagaagaagcagatcattgacggactgaacggaatccgtgaggatgtggaaaacggaacacttgagattacagataaatatgaagatattcacagctttgttgaggcaaacctgatcgaccggatcggggatgcaggaaagaagctgcatacaggaagaagcagaaacgaccaggttgcactggatatgagactttatacaagagatgagattattgagcttgacggactcttgaaagagattctggaagttcttctgaaactgatgaaagagaatgtcgaaacttacatgccgggatttacacatcttcagaaagcacagccgatcactcttgcacatcatatgggagcttatttcgagatgttcaagcgtgacagatccagaatgaaagacatttataagagaatgaattactgcccgctgggagctggagcacttgccggaacaacttatccgcttgacagagagtacacggcagagcttctggattttgcaggaccgacactgaacagtatggattctgtatctgacagagattatctgatcgagcttttgtcagcgatgtcaactgtgatgatgcatctgagcagattctcagaggaagtgatcatctggaattctaacgaatatcagtttgtggatattgatgacgcttacagtacaggaagcagtatcatgccacagaagaagaacccggatattgcagaacttgtacgtggtaagacaggaagagtttacggagcattgacttctcttctgacaacaatgaagggaattccgcttgcttataacaaagacatgcaggaagacaaagaacttgtattcgatgcaattgatacaacaaaaggatgtctggcactctttacaggaatgcttaagacaatgaagtttaacgatgcacgcatggaagagagtgcgaagcatggatttaccaatgcgacagatgcagcagattatctggtgaatcatggagttccgttccgtgatgcacatggaatcgttggacaactcgtactgtactgcattgagcataagaaagcactggatgatatgacaatggaagaattcaaagccatctcaccggtgtttgaagaagatatttatgatgcgatcagcatgaagacctgtgtagagatgagaaatacgatcggtgcaccgggaaaagcggcaatggagaaagtgatcgcaatcgaagaagcttatcttgtgacagagtaatggataatcacagcgagcaaaaataactgaaggttttctttcattatataatgggaattgaaagagaacgtttggatagaaaatagaaaataagaagaaaagggagaagaaaacaatggagcagaaattaaaagtaggtatccttggagcaacaggtatggtaggacagagatttatttccctgcttgagaaccatccatggtttgaagttgtaacagtagcagcaagcccgcgttccgcaggtaagacatatgaagaagcagtaggtgaccgttggaaaatggatacaccgatgccggaagcagttaagaagctggtagtcctgaatgtaaatgatgtagagcatgtagcatctacagttgattttgtattcagtgcagtggatatgtctaaagacgagatcaaagcaattgaagaagcatatgcgaagacagagacagcggttgtatctaacaacagtgcacaccgctggacaccggatgtaccaatggtagtaccggagatcaatgcagatcattttgaagtgatcaaagatcagaagaaacgtcttggaacaacacgcggattcattgcagtaaaaccaaactgctcaatccagagctatgcaccttgccttgcagcatggaaagagttcggaccaaaagaactggttgttacaacataccaggcaatctccggagcaggtaagacattcaaagactggccggaaatggttggaaatattatcccattcattggtggagaagaagagaagagcgagcaggagccgcttcgtgtacttggtaaagtagagaacggacagatcgtgaaagcagagcttccgaagatcacatgccagtgcgtgcgcgtaccggttctgaacggacatacagcagcagtattcatcaactttgagaagaagcctacaaaagagcagctgatcgagaagcttgtagcattcaagggattcccacaggaagcagaacttccgagtgctccgaagcagtttatccagtatcttgaagaggacaaccgtccacaggtaacagaggatgtgaactacgagcgtggaatgggtgtatctatcggacgtctgagagaagatacaatgttcgattacaagtttatcggactgtcccataacacagtaagaggtgcagcaggtggagcagttctctgtgcagaggcattgacagcaaaaggatatattgcagcaaaataagaaaatagaaaaggcagtggcagtacaaaaatagtcactgccttttatacgtatacaagtcgggaaggcagctgccagtccgatgaaagaaaatggggataaaaataaaaatggtatgagcaggaggattttatggagaaggagaaaaaaggaagagcgattgcactacttccaataggagtgtttttgatcatttttctcggtgcgggaattgtgttcaaagatttttatgcgatgccggcgatcgttgcgtttttgatcgcattgtttgttgcatttttgcagaataaagaattgagttttaacaagaagattgaagtgattgccaaaggtgttggtgaggaaaacatcattacgatgagcctgatctttctctgtgccggaggtttttcaggtgcagttactgcagcaggcggagtagacagtacagtcaatttaggattgtcattgatcccggcacattttgcagttgcaggtctgtttctgatcggatgttttatttcggtttctatgggaacttccatgggaacgattgcagcacttgcaccgatcgcagttggaatcagtgaaaagacaggatttgcacttagtatttgcatcggagcagttgtgtgtggagctatgtttggagataacctttctatgatctctgatacaacaattgcagcagttaagacacagggatgtgaaatgaaagacaagtttaaggcaaactttttcatcgttcttccggcagcgattattacagtattgatcttctggtttgcaacaagaaatatgaatttccatttggaggaaaacttaagttacagcctttgggaagttcttccgtatatggttgttcttcttggagcacttatcggaatcaatgtatttgttgttttgatcagcggaattgtgatctccctgatcgtaggtgtaagcatgggacatattgcactttctgaaatgttccaggttgttggaaatggtgtgacatcaatgtatgacatcacagttatttctatcattgtagcatgtatcgtatcacttgtgaaagagcatggtggaatccagttcattctgaatctgatcaagagcaagatcaatggaagaagaggagcagaattcggaatcgcacttcttgccctttttgttgatgcatgtacagcaaataatacggttgccattgttatgacaggtccaatcgcaaaagaaatcagtgaagagtttgatgtagatccgagaagatcagcctcacttctggatatgtttacatctgtaggccagggtatcattccatacggagcacagcttctgtcagcagcaacactgaccggattgacaccgcttcagattattccgaatctgtattatccgcttcttatgggagtatgcggagttttggcaatcatcttccggccacagagtaaaaaactacagtaaagtaaagtggtaacttaaaaaagcaaaaataatatattttcttgtggtataagaaaagttgtgttatacttgcagacaagagtgattttcactggaaactaaaagtaagaaatcaagataaaagagggatgtaaggatgaatctattatacaaaagcaccagaaattcagacaagactgttacagcttcacaggccatcttaaagggactggctgatgatggaggactgtttgttcctgtatccgttccgaaactggatgtgacaatggatgaacttaaagacatgtcatatcaggagacagcttatgcagttatgaaacagttctttacagattttacagaagaagaactgaaacactgcatcaacagtgcttatgattcaaagtttgatacagaagtgatcgcaccacttgtgaaggtgggagatacttatcatctggaactgttccacggagcaacgatcgcatttaaagatatggcactttctatcctgccgcatctgatgatcacttccgcaagaaagaaccaggtgaaaaatgatatcgtgatcctgacagcaacttccggagatacaggtaaggctgcacttgcaggttttgcagatgttccgggaacaaagatcatcgtgttctatccaaagggaggcgtaagccacgttcaggaattacagatggtgacacagaagggagagaatacttctgttgtagcaatccacggtaactttgataacgcacagagcggtgtgaaggcaatctttgaagacaaagagctggcagcagaattagatgcgaagggatatcagttctcatcagcaaactccatcaatatcggacgtcttgtaccgcaggttgtttattatgtatatgcttatgcaaagctgcttgagaatgaagagatccaggcaggcgaggagatcaatgttacagttccgacaggaaactttggaaatatccttgctgcatattatgcaaaacagatgggcgtgccgatcgcaaaactgatctgtgcttctaatgataacaaggttctctttgatttcttccagacaggtgtctatgacagaaacagagagttcatcctgacatcttcaccgtccatggacattctgatctccagcaatctggagcgtctgatctacacaatcgcaggacaggatgcacagaaggatgtagagctcatgacacagctgaaagaaaaaggtgtgtatgagatcacagctgagatgaaggaaggtctgaaagactttgtcggaggatttgcgacagaagaagaagtgaaagagacgatccatgacacatatcagaagacaggatatgtgatggatactcatacagcggttgcagcacatgtgtgtgcacagtatcgtaaagatacaaaggacgagaagaaatgtctggttgcttccacagcaagtccgtacaagttcgtacgcaacgttatgacagcaattgatccgaagtatgatgagatggaagactttgcactgattgatgagcttgaaaaagtatctggcttcccgattccaaatgcgatcaaagaaatccgtgatgcagaggttcgtcatacaacagagtgtgatgcagatcagatgaaagagacagtaaaaaatattcttggggtgtaaaaaatggataacagcatgtggggatttataggtatttttgttctatgttgtggaatttacgcattgtattcctttgttataatgaaagtaaagggcgagatcaatgcatcaattctcctgggaaaagattatacttataaaaaatgtaaggataaagaggcttatatagcaaaaacagctccggcactttttgtctttggactggtatctgtgatctatggagtgatcgatgtgattcactgttatgttcatacaatgacaatagtagatacagttgcaatgattattttccttattgtattgatctggttcggtgtttatacaagaaatctcagaaacagatattattaaaaatgtcagttccgtttctttttgctgacagaattgcaaaatccacatatttacagttgtaaaaatgatgtggatagagtataatagcaataggttaagaaagaagaaaaacctgaaatgtgcgagaaccctgatattttgaacctacattatttaaaaagggattccgataagactgagtaatatgccaggcctccgtttttgcagtggacggcagaaaagcagtatgaggttgcccacctagccgtggctaggactcaaaatacagggaacggcattttggggattagacaaaagataaagttaagggacagctgaagagattcggctgtctttcttttttgcttgaatattgagaatagttatggtattatccatgaagtaacaatttcgtggcggctgagaagaaacataagccgttctgagtatttaacctggggagttaaagaaaatggagaagtttaataagataaaagagcgcggattgcgaattgcagctaccgtgagttcgcatcacacgggagctttcgcagcacaggcggcatatttctttgtgctttcattgattcctatctttatgttgcttttaacaatggtacaatttacaccagtgacgaaagcggatgtgatggaggctgtacttccggtatttccatccacagtcagcccgatgattgaaagtattgtgaatcaggtatatatgacatctagttcaatcatccctgtgacgattttagttgcattgtggtcagctggaaagggtgtactttcagtaacctatggattgaactgcatttatgaaaatacagagacaagaaattatttttatctgcgtgcaagagcatgcctttatacatttttgttccttgtggcaatcatgctttcactggtactttccgtattcggcaacagtatcagtgtgatcgtttatgaacatgcaccatttttaagcaaggtgattcacaaggttgttcggttgcgtatttattttacgcttccgttgttgacatttttctgggatttggtatataagttccttccgaaccgtggagcagcagggaagactacacttcggaaacagctgccgggagctttctttactgcctgcgggtggatggcactttcctttatcttttccatctatttggatatttttaaaggattcactaatatgtatggtagttttacaacgatcattcttgttatgttgtggttatatacgtgtatgtatattattctgcttgggggagaaatcaatgcaattttagaaggggttaaaagcagaaaataagaaaaacacaaaaagtacacaaataattgacagaagaatacttaaggcgtatactacaagtgtatgaatatgccgcaatgtaaagattgggtagataatagacagaattgatgttattagcggtatagcctctcagatacaagatggaagtcagaagtcttttgatgtgatgagtgtctctatatattatatcgaaagatttttgaaatagtaaaaattgttttttataattaaaatggtttttgcgataatttataagaagggggggtagaagtcatacaaaagagacttatactcataattaagaaaggaaggaaagatttgttatgaaaaagaggatgagaaaactccttatttcaagccttacattagcgatgttactggttaattcgctgaatgtttttgctgctgaaacaagtgaggatcagacgacaaatgttgacgtaccgcttggagtgacatctgaacatacaatggatgtagagtctattccggcagaaacagcagaggccgttttgaatgtgacatttgcaacagtaaaaggtgagtatgttggaagcacaacagtaaaagaatcagctgcagaaggcgagggtgtattaaagacatttgaacttggaacagatttccagctgccagaaggatatcagctcgtatcatgtgtaccacagatgacaaagattaaagtagcttatggcacactgcgtgtacgcattatgatcgtagaaaagattccggctgtagatccagaaccaactccagatccagaaccaactccagatccggagccaactccagatccagagccgactccaactccagatccagagccgactccgactccagatccagaaccagctccaaatccagagccgactccaactccagatccaaagccgactccagatcaaactacacctgtaaatccaactccggtaaaaccagctgtagaaaaggataataacaaaacaaatgacaatacaaacaagaaagtagatacagcagataagaaaacaacaaagacagaagctcctaagacaggagatacagctaatatcgcaatgaatgtttttgtaatggctatttgtggtgctgcaattgttactgttattttcagaaagagatttacacgtagataataagaattgtcttgatttgaattaagataatacataattgccagaagtgtctaaacagatgcttttggcaattttctttttatcaaacaaaaattgtacactataataggagttcatttagacttgacaaaaagaaatgctgtgttaaaatagactggtaaattcacttagaatatgaaaagtttattagatttgaaaagcgaagatcgtgcacagtagagacctgttttcttgcagagagagagaatcatcggctgaaagttctcttaagttcagatagcgattgaaattcacacgtgagctgcatttttgaaaggaagcatctaagggacagtcaggagaacggatatgttcggatgtgaaaagtagagaatgtcgtatgttgtacgttacacaacttagagtgcctgtagatcagaatgcaggaatcagggtggtaccgcgagtgattcagacctcgtcccttttgggatgaggtctttctttatgaaaacgttcgtccctgataagtgagttaagaaaggagaaaacgatgaaagaaagactggaacagattaaagcggaagcagtcgcaagaattcaggaggctgacgttccggagaaactcaatgacgtgcgtgtaaagtttcttggtaaaaaaggtgaactgacagccgtattaaaaggaatgaaagatgttgcaccggaggaacgtccgaaggttggacagcttgtgaatgatacaagagcagcaattgaggaactcttagaggaatctaagacaagaatggagaaagcgattcgtgaagagaagctgaaagcagaagtaatcgatgttacacttccatctaagaagaacagtgtaggacatagacatccgaacacaatcgcactggaagaagtagagcgtatcttcgtaggcatgggatatgaagttgtagaaggaccggaagttgagtatgatctgtataactttgagaagctgaacattccggcagatcatccggcaaaggatgagcaggatactttctatattaataaagatatcgtacttcgtacacagacatctccggtacaggcccgtgtgatggagcagggaaaacttccgattcgtatgatcgcaccgggacgtgtattccgttccgacgaagtagatgcaacacattcaccatccttccatcagatcgagggtcttgtgatcgacaagaacatttccttcgctgacctgaaaggaacacttgaagtattcgcaaaagagctgtttggaccggacacaaagacaaaattccgtccacatcatttcccatttacagagccaagtgctgaggttgatgtaagctgctttaagtgtggcggcaagggatgtcgtttctgtaaaggatcaggctggatcgagattcttggatgtggtatggttcatccacatgttctcgagatgtgcggaattgatccggaagagtacaacggatttgcattcggtgtaggactggagcgtatcgctcttctgaaatatgagatcgacgatatgcgtttattatacgagaacgacatcagattcctgaaacagttctaacgagcgcgataaaatcttcaagcggcgcgaatgcggcgcggcaacggcgcagagccgttggattttagagccgcccctttgatgaaattaaactaaaaaaggagatataaaatggatacttcattatcatggatcaaagcgtatgtcccggatcttgacgtgacagcgcaggaatatacagatgcaatgactctgacaggaacaaaggttgaaggattcgaggagctggatgcagaccttgacaagatcgttgtgggtcagattgagaaaattgagaaacacccggatgcggacaagctggtagtttgccaggtgaatatcggtacagaggttatacagatcgtaacaggtgcaaaaaatgtgttcgagggagcgaaagttcctgttgtattagacggtggacgcgttgcaggcggacatgagccgggacagagagttgccggtggaattaagatcaagaaaggaaaactccgtggagttccaagttacggaatgatgtgttctatcgaagaacttggttctacaaaggagatgtatccggaacagccggagaatggtatttacattttcccggaggacacagaggttggagcagatgcgatagaacttcttggtcttcatgatgttgtttttgaatatgagatcacatcaaaccgtgtagactgctacagtgtagtaggtatcgcacgtgaagcagctgctacatttaataaagagtttaaaccaccggttgtaacagagacaggaaatgatgaggatgtcaatgactatgtaaaggtgactgtagagaatacagatctgtgttccagatactgcgcaagagcggttaagaatattaagatcggaccatcaccaaagtggttacagcgcagactgtcatctgttggaatccgtccaatcaacaacctggttgatattacaaactatgtaatggaagagtacggacagccaatgcatgcttatgatcttgatacacttgcaggacatcagatcgtagttaagaatgcacaggatggagagaagttcgttacactggatggacaggaaagaacaatggacaaagatgttctgatgatctgtgacggagaaaaagctgttggaatcgccggaatcatgggaggagagaattccatgattacagataacgtgaagacaatgctttttgaggcagcttgttttgacggggtgaatatccgtaagtccagtaagcgtgtcggacttcgtacagatgcttccggtaagtttgagaagggacttgatccgaacaatgcaatggatgcactgaaccgtgcctgccagcttgtagaagagcttggagcaggtgaagttgtcggaggagcaattgacgtatacagcaagaagaaagagcctgtacgtgttccatttgatgcagagaagatcaaccgcatgctcggaacaaatatttctgaggaagatatgcttggatatttcaagaaaatcgatcttgattacgatgcagagacaaaagaagtgatcgcaccgacattccgtcacgatctgttcagattagctgaccttgcagaggaagttgcaagatttttcggatatgacaatatcccgacaacacttccgtctggagaggctacaacaggtaagcttccgttcaagcttcgtattgagcaggttgcaagtgatattgctgagttctgtggattcagtcagggaatgtcttattccttcgagagcccgaaggtatttgataaacttcttcttccagaggattcaaagcttcgcaatgcaatctcaatcatgaatccgcttggagaagactatagtatcatgcgtacaacatccttaaatggtatgctgacttctcttgcaacaaactataacagaagaaataagaatgtccgtctgtatgagatgggaaatatttacattccgcaggagcttccactgacagagcttccggatgagagaatgcagtttacacttggaatgtatggagatggagatttcttcaacatgaaaggtgtagtggaagagttctttgagaaaatcggtatgaagggcagagagaaatacgatccgaatgcaggaaagtcattccttcacccgggacgccaggcaaacatcatttatgatggaaaagtagttggatatcttggagaagttcatccggaagttgctgatatctatggaatcggtgagcgcgcatatgttgcagttctggatatgccggagattattccatatgctacatttgacagaaagtacacaggaattgctaaatatcctgcagtgacaagagatatcagtatggttgttccgaaagaaatccttgtcggacagattgaagatgtgattgagaaaaagggcggcgctcatttagagagctttaacctgtttgacatctatgaaggtgctcagatcaaagcaggattcaagtcagttgcttattctatcgtattccgtgcaaaggataagacactggaagaagctgaaattacagcagcaatggatcgcattctttccggtctggaagaacttggtattgagttgagaaagtaagaagagagggtaagagcattgaaaacaagtgatttttattatgatcttccggaggaactgatcgcacaggatcctttggaggaccgctcttcctcccgccttatgatacttgataaagagacagggaagacagagcatcatgtatttcgtgagattatcgatgaactgaatccaggagattgtctggttatcaatgatacgaaagtaattccggccagactgatcggagcaaaggaagacaccggagcaaagatagaagtgcttcttttaaaacgaggagcagatgatgtctgggagacattggtaaagcctggaaaaaaggcaagaccgggagcaagaatcagctttggagacggtctgcttgtcggagaagttatggatgtagtggaggaaggaaatcgtctgatccattttgaatacgaaggaatcttcgaggagattctggaccagttaggacagatgccgcttccaccgtatattacacatcagcttcaggataaggacagatataatactgtctatgcggtacactcaggttctgcggcagcaccgacggccggacttcatttcacaccggagcttttggaagagattcgcgcgaaaggtgtggagatcgcaccggttacacttcatgtcggacttggaacgttccgtccggtgaaggtagatgatgtggagcatcaccatatgcattcagaattttatatgattacagaagagtctgcacagaagatcaaccatgcaaaagaagcaggacatcgtgtcatctgtgtcggaacaacaagctgcagaacaatcgaatccgctgccgatgagaatggaagattaaaagaatgcagtggttggacagaaatctttatctatccgggatatcagttcaagattctggatgcgttgatcacgaacttccatctgccggaatctacactgatcatgcttgtttctgcattagccggaaaagagcatgtgatggcagcgtatgaggaggcagtaaaagaaagatatcgtttcttcagttttggggatgcgatgttcatacgatagaaagggacaacctatgtcagaaaatgattttatcattgtagatgaagaagagacaaacaaggaagacaacagacaggacactggcagggaagaagaaaaaaaagaagtgacaacttctgaccattctgaaaaagatgatgacggatatgagagaatatgttttatttgtcatcgcccggagagtgtgactgggaagatggttgagcttccgaataatatcgcagtatgtccggattgtatgcagagaagctttgatatgatgaacaatagttcgatggatctgagcaagatgatgaacattccgggcgtacagtttttgaacctttcggatcttgataatctgcagccaaaggcacagaagatcaaacagaagaagaaaaaaccgaaagagtttaaacagttggatattaaaaagattccggcgcctcataagatcaaagcccgtctggatgaatatattgtcggacaggagtatgcaaagaaagcaatctctgtagcggtatataatcattataaacgtgtggcaaccggaacaatggatgagattgagatagagaaatcaaatatgctcatgattgggcctacaggatgtggtaaaacatatctggttaagacactggcgaagcttttagatgtgccgctggcgatcacagatgcaacatctcttacagaggcaggatatatcggtgatgacatcgaaagtgttgtttccaagcttcttgcagcagcagacaatgatgttgagcgtgcggaacagggaattatttttatcgatgagatcgataagattgccaagaaaaaaacttccagtcagagagatgtgagtggtgaatctgtgcagcagggaatgctcaaactcttagagggaagtgaagttgaagttccggtaggcgcgaacagcaagaatgcaatggttccactgacaacagtgaatacaaaaaatattctgtttatctgtggaggtgcattcccggatcttgaagacattatcaaagagcgtctgcagaagaaaacgtcgatgggattcaatgcagaactgaaagatacagtcgagcatgatgaagagctgctctctaaggtgacaattgaggacttaagaaaattcggtatgatcccggagttcttaggacgtcttccgattgtatttacattaaagggactcgacaaagagatgcttgtcaagatcttaaaagagccgaaaaatgcaattttaaaacagtatcagaagctgctggcattagatgaagtgaagcttgagtttgatgacagcgcattagaagcaattgcagaaaaggcaatggaaaaagataccggagccagagcactgcgtgcgatcattgaggaatttatgctggatattatgtatgagattccgaaagatgataatattggagaagtaacaattacaagagcttatatagaaggtaccggcggaccggttattcagttgagaggccaggcagtaccgagattagatggataaagtgagattttagaaagagaagttttgttcaaaaatctgaaaactgattggggaattagtttaaaaaaatcacaaaaaggaagagaaaaaaatggacacatacagatacttactggatttagcaattattcttatatctacaaaattacttggactgttaacaagacgagtacagatgccgcaggttgttggcgcacttctggcgggattgatcctcggaccggcaggatttggaattctgtcagagacttcatttatccatgaagttgcagaaatcggagttattgttctgatgtttactgcaggtatggagacggatatcaaagagctgaaagcaagtggaaaagcttcttttattattgctctttgtggtgtgatcgttccactgatcggaggttatggtgttgcctggttctttaaccgtccaagcatggcaggaagtaacctgtcatcccctgtagttcttcagaatgtctttattggagttgtactcacagcaacgtctgtaagtattacagtagagacattgaaagaattaggagcattgaagagccgttcaggaaatgcaatccttggtgctgcgatcattgatgatgttctcggtattatcgcattgacaatcgttacaagtcttgcagatgattctgtaaagattggaatggttctgattaaaatcgtgggattcttcgtattttcaggtgttgtaggatttgttttctataagatgtataagaaatgggttgacggagctgagaaggaactgcatcgtcatacgattattgcatttgtattctgcctgattatggcatttatcgcagaagaagttttcggtgttgcagatattacaggtgcatatatcgcaggattaattatttccaacgtacagagatctacttatctggagtctaagtttgatacgttgtcttacctgcttctgtcaccggtatttttcgcaagtatcggtctgaaggtaaaccttccacagatgtcagtatccatcattatgttcgcagttgctcttacagttgtggcagttcttactaagatagtcggctgtggacttggtgcaaagatttgtggttacaagaattatcaggcgaaacgaatcggagtgggaatgatctcccgtggtgaggttgccttgatcgtagcaagtaaaggttccgcactcggacttatgagttcttccatcttaggaccggttatcgtagtggttgttattacaacagtcatcacaccgattcttctgaaagtagtgttcgctcctggaacaggaccgtcaacacaggtagaagatgctaagaaggttacaagctactatgagaatcgagaagataacagatagaacaaaagagaaaagaatcgataaaagatattgtagaaactttgaggtcatgggacagttaaagctgtctcatgacctcaaatgtgttatagaggtttaattgtccgtatccccattcacggttagggtattccatactgtctggtcggatggctccaagaacaagaaggcttttgatctggaatacgtcgatgccgggcattttgcgttcatagagctgccattctaacataagtgcgactgccccggcggtgatagcggttgcggcgcaggagccgctgcgcacggcaaaacggtctcctggaagagctcctttgatattaatcccgggagcagtgatggaaggattcttaaagcttgttcttgtatagccgcgtccggatgcctgggcgactgcaccattgctgccgtcgtaataggagaccgtcagaggactaggggcattggccgggtttgtaagagtcgtgtaaggatctgattctaggaaatagacttctccgtctaaaaattctgtgacaggaagccagatatggaaatcaccattaatcaggcgggtcggttctacgatgattttccagatgccttctgccggggtacggaaacggaagaagatgagttcagagtttgctttttcgaccagaagccggtagtcaacagagacgcgggttttttcaaagagaaaatcaatgtctgcacttgtgcctacatgaaatggaattttggatgtattttccccggacggtgaaataattgaaattgagaagagattggggatcagcacccaaagttccaaagtgaaaccagatacattttcaccaacccggatctctacagttttacggtcattttctgactggatcgtattgaaataatgatgacgtttgtctgcttcatttcccgtgccgaccacagcaatccggtcgggcatcagactgtagctgccaagtaatgcgggaagcggaagcgtgcctacatgaccgccaagattagagcctacagtgatacacatgacaagtggaagccccagttcatctgccagatcattcagatattttaatccaaggatcagatctgtttcctgatagcagacggctgtttccgtgatgcagtaataatcccgcaggtattgcttcgcttgttttaatttgacaacagcgagagtagattccggagcggctcccagaaactgttcgtcagcgtcagcatttccggcagcgagactggcaatataagttccatgtccgtcgatatcgacagaagggacctgtgacagtggggaatcagaagaaagtgccagatcaatctcttccttacggtattcacttccgtagaagaagtctctgggtggagttccgttttgaatagtttgatcccaaagtgccgcaattcgcgtggtaccgtccagattgcggaaaactttgttttgatagtcaattccgctgtcaagaaatccaatcagaacgccttttccttttaattgaagtgccggatagttctgcacaggaaggatgccggtctggttcaatgtttccatagcgacaggagcaaaacaattcggaatggaattgtaagaaaaacgcgccagagagattggctctacaagttctttggaaaaataaatgcactgatatccaagcccggcatcctggatacatggatcttttttcagaagttcattgaacagtggagtgcgcagcggattactgatgaagtcgcgtgtatcttcggagagtatctgttccctgcaagtttcaagatcattcataagatgactcctgagttgagttgtagaaaggatatgcaagaaggattctatttatgaaattagtctaaaaataatagaaaatgacttcaaaaactggaagaatacgatataataagaccaagagaaattgtagatcacctttctggtggttgagatgatacagcaatgataagaagggagatttcagtatgaaagatttttttgaagatttaggaaaacgtctgagcgagacagcagaggcagtgacagcaaaggcaggagacgcgattgagatacagaaattaaaagcacagatcagagagcttgcaagaggaaatgcagaagatctgatggaacttggtcagagtatttatgacagatttgagaatggagaagaactggatgaggcttccaagggactgtgcgaggcaattgcaagccgcaaggaaagcatggaagagtatgagaataagattgaagggctcaaaggtgcgtgtgagtgtacacggtgtggtaagatggttgcgaaagatatggctttctgcccatactgcggatcacctgtagcagaggaagaagatatttttgaagctgatgatctggctcaggaagtaagagaagaggcagaggaagcagaagagagcgttgcagaggctgctgaagcagcagttgaggcggttactgaggccgcagaagaagcagtggatgcagtagaagagtctgtgaaagaagagacagaagaatagtttcaaggatttaagggagaatggaacgtgaaggttgttatattaagttttacacaggcaggaacaagacttggtgagagaattggaagtcagttccggaacgaagggattacgtgtcagaactatgcacctgccggatatgcattcgctgacattcttccgtttccggacaatccaaaagagctgatcagggaaggatggggagagacatccttcctttttattggtgcagttggaatcgcagtgagatatattgcgccttatgtaaaggataaattcactgattcagcggttgtagtcatggatgaaaaagcagggtatgtgatcccactgctgtcaggacatctcgggggtgcggtggaactttccaatcagcttgcagtatggaccggcgcagttccggtacagacaacagcgacagatgttcagggaaaatttgcagtagatgtttttgcaaagaagaatcacctgcattttacagagcgcgaagcagcgaagcagatatcagccgcagtgctggatggaaagcaggtcggtctgtggatcggtgaaggactggtatttgaacaggaagattttcagaaaagctgtttaaaagaacttatactatgtggttcacaggaagaattgtactcctttgcagaggaacatcctgtgatcgtgatcacaaagaccgcagaagaagggagacagttcgtggaatccctagcgggttctctgtggggagatgtcaggaataacgtatgtggatgtgagcgtaagccatgcattctccttttgtatccaatcaatatcacggcaggagtaggctgtagaaaacagatttcaaaagaactttttgaaaagggtctaaacgatgttctggaagggtatggacttgaacctacgcagttaaaacagcttgcatcgatcgatcttaagaaagaagaacctgcgattttggcctatgcgcagaaatataaagtaccgtttgcaacttatccggcagaacagttagagaagattacagaggtatcagccacatcacggtttgtgaaacaggtgacaggtgttgacaatgtgtgtgagagagccgcacggacagcagatgctgacggagaactgctgtgtcccaagtgcataagagagcagatgacggtggcattgacagagacagaagtaacacttcaattttaaaacgaaagaaagttccagaatcttccgacattctggaacttttttctactaaagtatctgttcttttgactggagtgcatcatatcctgtctcacgggtgcggatcttcatggcactccggatttcatagctgaagatcttaccatcaccgacttcaccggtataggcagctttctggattgcttcgattgtttttttctcccattcttcggaagagacaacaatttcaaatttgattttcggctgcatgaaaatctcaatctcagaaccacggacaatctccttataacctcgctgtgcaccacatcccatgacctgggagacagtgataccattgacttctatttcatttaaggcagccttgacatcctcaaatttctcttcccgaacgatagcttctactttaatcatcattttaaaaatcctcctgtattaatggatatataaattttggacagattatattagtcgaatccgttgaaggacggatatgcattttcaccatgttgggagatatccagtccaagagcttcttccttctgatctacgcgcagtggagtgaagatacggataattccaatgcagatcagagtaccgacaactgcaacagccgcagtgatgataatgcttaatacctgtgcaacgaagagatgaacattaccgaagaccagtccgtcccatcttgcaacagagttaatagaagtttttgtaaaaagtccggttgcaattccaccccatacaccgccgattccatggcagccaaatgcgtccagtgcatcatctattttcagtttatgcttaatgaagttcattgtaaagtagcagatcgggctgaccagtgcaccgatgatataggaagaccagatcggaacaaatcctgctcccggtgtaatagcaaccagtccgacaaccagcccggtagaagcaccgaccagagtaggcttcccgtctttgatcacatcgatcagcatccaggatacgagagcagctgcggaagaaattgcacttgtcataaatgcatgggctgcaagtccatctgccgccagggcacttcctgcattgaatccaaaccatccgaaccagagcagggaagctccaagcacaacaaaaggaatattatggatacggtaagatgttttttcgtatccttttcttctgccaagatatgttgcgagaaccagggcactgacgccggaactgatgtgtaccacatttccgcctgcaaagtcaacggagccgattgctgcaaggaatcctccctctccccagaccatatgagccatcggatagtaaacgaggaaagaccacagtgcaataaatgcaaataatgccttaaatctcatccttccgactacagcaccggtgatcagtgccggagtaatcatggcaaacatcatctggaatgcagcaaatacaagatgcggaatggtatccgcatacggaccggcttcccagccgacatcatttaaaaaagcccagcggaaatctccgataattccggcgtggttgccgccaaaagaaagagaatagccaaacatggtccaaagaagaacagatagtcccatgatcgcaacgcaggccatcattgtgttacatacattttttctccgcacaagaccgccatagaagaaggcaagtcccggtgtcataaagaagacaagcgcagtgcagatcatcataaaagcagtgtttccggtgttcattttctaaatcctcccaattcatctgataatgcaaaaaagacgcctgatagaaaggcaatctcttacctttctgtcagacgtctttgtcttgcatattaagatatcacggcttttggaaaaatgcaagagaaaattttgtggttgccggtcgcacacagtatgaacagtaagtaacttatgcggaacaagttgaagaaaaagtgtttttgctttataatcagtgacagagtaaaaagaaagggttcgatggatgattatgaaagagcatacgcatttccgtgaggacggaacagaatatacccacgtgcatcataacggagatggggtggcagagtcacatgtacatcatcacgatcatggcggcacaggacatgttcaccgtcatgtacacagtgcagaagaaaagaagaaggtaatgaatcgtttatccagagcaatcggacatcttgaggcagtgaagcgaatggtggagcgcgatgaagattgcagtgaagtactgatccagcttgcggcagttcgttctgcaatcaataatacaggaaaagtgattttaaagaatcatctggatcattgtattgtggaagctattgagcagaatgatatggagacaatccgtgctcttgacgaggcaatcgataagtttattaaataaatgtaaatgtgggtgatttgatgaagaaaaatattcttatttttgccggtacgacagagggacgacagctggcagaatacgccgttaaagaaggaattccctgtatcgtaagtgctgcgacagaatatggggaagaactattggaaaatgatctgcagttgcgaaaagagaagcataagcaatcagaacttcgagtgattcacggacgtatggatcagcaggagatggaagcattctttgaaaaagagcaggtggggcttgtcatagatgcgacgcatccgtttgcagttatagtgacggaaaatatacagcgggcatgtaaaaacagcggaatagagtatttacgatgtttaagagattttttgacagaagcaaaggcagtcaggtcagaaaaacttgcttgtgaaagaacaaatgcgattgctaagagtgacagttctgtagtctgtgtgaatagcgtggaagaggccgtggactatctcgagcagacgcagggaaatatactgataacaacaggcagtaaagaactggataaatatactcgtttgacaaattataaagagcggtgctatgcaagagtactttccgtacttccttcagtgatgcagagcatagatctcggattttcagggaagcatctgattgcaatgcagggcccgttttccagggaaatgaatcttgcacttcttcatcagacagaggcaaaatatttcgtaacaaaagaatccggaaagaatggaggatttgcagaaaagcttgaagcagcagagcaggcaggtgcagttcttcttgtaattggaaggccgatagaagaaggcttgtcggtagaggaagcagaacaggagatgagaaaatggaacagggattgatacacatttattgtggagatggaaaagggaaaacatcagcggcaatcggacttgcagtccgtgctgcaggaagtggacttaaggttttatttacccggtttttaaaaaatgaatcttccggagaactggcgattctcgatgatatttctcagattaaagtacttcatcttgaaaagtcttatggcttttttaaaaatctttccgaagagaaaaagcaggaagtaagggaaacttatctgcggttatggagagcgattgaactggagattcttaccggaagatatgatgtgcttgtaatcgatgagtttatggcagcgtataagtatgatttgattccgaaggaggaagcaatcgagttcctggagaagaaaccaaaagaactggagattgtattgactggacgaaatccggatgaaaagcttgtagaactggcagattatgtgtcagaaatcaagaaagtgaagcatccgtttgatcagggaatctacgcgagaaaagggattgaatattgatgaaggaaatcggaagaacaagatcgggacttcagatgggatatacgaccggaagctgtgcggcagcggcggcaaaagcggcagcagagatgttattgtcgggagaagagattcgccaggtgagactgctgacgccgaagggcattgaactgtatcttgagttggaagagatcatgcgtaggaagtcagaagtttcatgtgcagtgcgaaaatacagtggagacgatccggatgtgacgaatggaatacttgtttatgcaacagttcaaaaggtagagaagaagagtaaaataaattcggagaatagtgtggatctttccgagaaaatcaatctggatggtggtataggaatcggccgtgtaacgaagcctggactggaacagaaaatcggtcaggcagcaatcaacaaagtaccgcggagaatgatctgtgaagcagtggaagaagtttgcaggaagtatgaatatacaggaaatctgcaagtgcgcctatccgtgccggaaggggcagaggttgcaaagaagacatttaatccaagactggggattgagggaggaatctcaatcttaggaacaacaggtatcgtggaaccaatgagtgagaaggcactgacggatacgatttatctggaaatgaagatgctcaaagaaaatggaacagattggtgttatgttgttccgggaaattatggtatggactttctaagggagaaactgcaggtagatacggcactttctgtaaaatgcagtaattatgtcggtgagacaattgaggatgcaaagtttcttggaatgaaaggtattctcttgatcgggcatattggtaagtttatcaaactggcagcaggagtgatgaatacgcattccagacaggcagattgtcgaatggaagtgcttggtgtgcatgcagcaatgaatggtgcagatgcagcagttgtgcgggaaatcatggattgtatcaatacaacggaagcaatggaaatactgcgaagagaaaatctggttaaaccggtgatggaaagtgtaatgaaacggattgaattctttataaagaacagagccggcgaggaattaaaaatcggtgtgattttattttcaacagaggatggcattcttggaaagtcagaaaatgcggatgagttgttaaagaagatacaggagaatagatgaaacaagcaggaaaattttatggaatcggagtgggaccgggagatcctgaattaatgacattaaaagcagttcgaacaatcagggactgtgatgtaatagtacttccggtttcaaatagagaattgacagagccaatgttgcttgagcaaaatggaaaagagaacaaggcgttaagatatttagaaggctgtacggcatatcagattgcagtacaagcagttccggagattgagaaaaagcagattctctttctgccaatgccgatgattaaggacaaaaaggtgttgagaaagattcatgcaaaaggcgcggaaacgatagggcaattccttgaacaagggtacagtatagcatttttaaccataggagatccgacggtttattccacttgtatgtatgtggaacagatgatcgaacaacaggggtatcctgttgaaactgtttccggaatcccgtcattttgtgcagcggcggcaagattaaatcagccacttggagagcaggaagatcagatccatattttaccggggtcttatgaagcgggagaaggtattcaattacctggaacaaagattctgatgaagaccggaagaaaaatgggacagataaaagagttattacgagaaagcggacaagatatttgtctcatagaaaactgtggtatggatcatgaacagattattcggacggcagaagagatttcagaagatgcgggatactattcccttctaattgtaaaagacaggaaaagatagaaaaggcaggaagaattatgattacatttgtaggagcaggtccgggagcagaagatctgattacagtacgcggacaaagacttttgaaagaagcagacatcgtgatctatgcgggttctcttgtgaacccgggattacttaaactgtgtaaagaaaagtgtgagatatataatagtgcaaagatgacattggaagaagtgttagaagtgatggtgaagggtcatggggacggaaaagaaatcgtacgtctgcatacaggagatccttgcctttatggtgcgatccgagagcagatggatgaactgaagaaacttgagataccatatgaagattgtccgggtgtcagttcattttgcggagctgcggcagcactggaagcggagtacacacttccgggaatctcccagtcagttgtaattacgagaatggctggaagaacgccggtgccggagaaagaatccgttagaagctttgcggcacatcaggcaacgatggtacttttcttgagtacagggcttttgaaagagctttcagcagaattgatcgaaggcggatacaacgaagatacaccggcagctattgtttataaagcgacctggccagaacagaaagtactttgttgtacggtaggaacgctggaacagactgcacgtgaggcggatgtcaccaagacagcgctgatcgtagtcggagaagtgcttgacgggacttatgagagatcaaagctttatgatccgacatttacgacagaattcagacaagcatcctgttctaagaaggaattaggacaaaccggagagaatcaaagcaaagagatgagacaggaagcagaggggcagagcaaatgagtacagtatatgtagtaggaatcggaccgggagcagaagagcagatgacagtgcgtgcacagaaagtattggagcattgccctgttttgatcggttacaatgtttatattgatcttgtgaaagagcagtttcctgataagatatttttgagcactccgatgcggaaagaaccggaacgctgcagaatggcttttgaagaagcagaaaaaggtcaggacgttgcaatgatctgtagcggagacgccggagtctatggaatggcaggattgatcttcgagataggaaaagaataccctgagattcagatagaagttgttccgggaattacagcggcatcaggaggtgcagctgttcttggagcgccgctcatgcatgactttgcagtaatcagtttaagtgaccttctgacaccgtgggagacgattgagaagcgtctacatgcggcaggaatggctgattttgtcatctgcctttacaatccgtcaagtaagaagcgcgcagattatctgcagaaagcctgtgatatactgcttcagtacagagatgtgggaaatatctgcggttatgtgaagaatatcggacgtgaaggagaaacttatcagattctgtcattgaaagaacttagagatacaaaggtggatatgtttacaaccgtgtttatcggaaattcaagaacgatggaactgaatgggcggatggtgacgccgagggggtataaactgttataagaaaaaagaaacgggcaggccacaacaagaagtgtggtaaaaacccgtttctagattttattatagcagatagaaaccaaaagaatcaagggaaaaatagttatatagtgggagatgaaatggaatcacgacaaattatccttgcgggaataggaatgggatctggtgatgtaatcacagaagaagtcagacaattgatagaagaggcggattgtctgatcggagcagaacgaatgattacgagtgcgcagaagattcgtagcatgaatggattaagtatgcgtcagtgtgagagaaacaacaggaatgaaggagtctttattaaggaatatcgtacagaagagattgtatcctatataaaagagcacaaagaacatagtaaaataggaattcttctttcgggagatacaggattttatagtggtgcgaaaaaactgaaagaacgattgacggaagtgtgttctgaccaaataaaaatttatcctgggatttcctcactttcttatcttgcatcaaaagtcggtgtttcctgggaagatgcaaaaattctgagccttcatggaaaagacatgaattttgtacagacgattcacagacattctaagacctttctgcttctcggaggaaaagacacggggcgtcatttctatgagacattactagagtatggcttagaaaatgtgcaggttcatgtgggacgccagatgtcttatgaggaagaaaagatactttcgggcaaattgtacgagatgaaggcagaagattttgaaggactttgcgcagttcttgtagaaaatccatcttattgtaaggcggccggtatgcatctgaaagatgaagaatttctccgaggaaaggtgccaatgacgaagtcggaagtgcgttctgtcagtatagcagagcttgaattaaccgaggatgcaattgtgtatgatatcggcgccggaacaggttccgtttctattgaaattgcacgtgcaagtgagcagatccgtgtgtatgcgattgagaagaatccggaaggagtgaaactgatcgatcagaatcggaagaaatttaggacagacggagtgcgaatcatagaagggtttgcgccacagacattagagaaactggaaacaccgacacatgcatttgtcggtggaagttcgggaaacttacgagaaattgtccaattacttcagaggaaaaatccggatgtgcgaatcgtgatcaatgcgatttcacttgaaacagtcagtgaagtgatggggcttgtggacgaaggggttctcccagatgcggagattctgcaagtgagtgcagcaagatcaaaggttcttggaagatatcatatgatgatgggacaaaatccggtttatattatttccgcaggtggaagaaagcctggacaggtataagatgagagaaaaggaaacaaacagacaggagaatcatgagaaaaatgaaagagaatgcttgcaataataaaaatcagaaaaaaaatccagggtttttgttgtctgctgtttccagtaatagtggaaagacagctgcagcctgtggcctgatgtctgcgtttaagcaagagggaaagcgtgtatgtgcgtgtaaatgcggcccggattatatagatccaatgttccacagggaggttcttggcgttgattctaagaatctggatctattcttctcggaagaagacattttgaaagagggatacctaaagcatacgaaagatgcggatattactataaccgaaggcgttatggggttctatgacggaatgtcacttgattctgtaaaaggaagttcttatgatgttgcacagacgctaggattgccagtgatccttgtgattaatgcgagaggtgcagcaatgacacttgtagctacggtgaaaggaattgttgaatttcgtccggatagcaatattcgtggaattctcttaaacagagtatccgcaatgctatatccaagattaaaagaaatgttggagaatgaactggcgagaatcgggcatgacgagattaaaattgtcggttacatgccggaaaatgaagcttttcatctggaaagccgtcatctgggacttgtaacaccgcaggaaatggaaaatctgcaggagaaggtaagacaggcgggagaaattctggcaaaaacagtggatcttgaattgctggaaaagattgccggtgaagcagcagtatggaaaacagaagttattgaagaatcggagaaggttggaaatttaaaaagtaagaacgatccagttcgaatcgcagtggcgcgtgacgaagctttctgtttttattacaaagataaccttgaactattagaaagctttggctgtgaactgatagaattcagtccgctccgggatgagaaacttccggataatatcagtggattgatactcggaggaggttatcctgaactgtatggaaaagaattggcagaaaatcagagcatgcttgaatcaataagaagagcattggatgataagattccatgtctggcagagtgtggtggatttatgtatcttcatgaagaaatggaggatgcagatggaaatgtttggaaattagtagggcgaatccatggaaaaacatttccgacaggtaaactggttcgatttggatatgtgaatttacagaggaatcttgatgagaatcaggtttctgagcttaaagaacggatgagtatagcggacagctggattcttccgggtgagaatatccgtgcacacgagtttcattactgggatagcacagacagtggaagtgactgtcttgctgtcaagccggatggaaagagaaaatgggaatgcatacatatggaagagaatctcgtggcgggatatccgcatttgtattatccatcttgtaaagaatttgcggagcgttttgtagaaaaatgcagaagcggttacagagaatagaacaaagagaaacagcaacagatgtcgttataataacatctgctgctgtttttttaggctctatgaaatatccagatcaatcggttcgtccaaatgttcggaaacatattttccatttttcttccgctgcctgacgcactcagtcagaagatattcaatctgaccgtttacggaacgaaaatcatcttctgcccaggctgcgattgcgtcatacagtttagcggagagacggagaggaacctgcttctttttattatctttttcagccatatctagtacagacttccggaattaatgatcggctgtgtgtcatggtttccacacagaactacgagtaaattggataccatagcagccttacgttcttcatccagttctaccacttctttttcacttaattgatctaaagccatttcaaccatgccgactgctccgtctacaatcatctttcttgcatcgatgatagcggaagcctgctgacgctggagcatgacagcagcgatttccggtgcataagcaagatatgtgattcttgcttcgatgatctcaagccctgcgtctgtcactttcgtctggatctcttcacggattcgcgctgcaacaatctcactggagccacggagacttccctcatcagcctttccgtcaccggttgtatcgacatcaggagcagtgtcatatggatagatgcggacaatattacgaagagcaccatcacactgaagtgagagatattctttgtaattatcaacattaaagacagctttcgcagtatctacgacacgccatgttacggcaataccaatctcaatcggatttccgagacagtcattgatcttctgacgggagttgttcagtgtcataaccttgagagaaatctttttgcttgaagactcttcagtggttcctgttgtagaaacacccaggagactggaaagatttgctcccttcttggaattgttatcaacatctccactctgactcaactttgtcttggaagcagggtttacactggtacagaatggattgacaaaatagaatccggcttctttcagtgtaccgatatagtttccaaaaagtgtaagaaccagagcttcctgtggtttcagcaccttcaatccaagaaatggaacccatccgatgcacagccagataatgctgacaaccagtccagcgataaccggcggagctgagaattcatgttccagtgcaattgcggacagaacgcatcctgctattgcgattagatagagcagacaaaagagcagaagcattcccattccgtttttcttatttgataatattttttcattcatagtgattcctcctctggaaataaaatgaaatttatttgatatcattatgatatcacttttagaaaaagaagtcaacaagaacaaagaatgtgccttggcacattcttgcgcctgcggcggtcgcttgcgacacctaccttgtacgccgcagtgcgcatcctgagcggagcgttttttatatattaggaaaggactttcctaatatataaaaaagctgtgaaagataagcaatttcatctttcacagcttctattcacatatttattctatcaatcccagaattttggaatacaagaacaatcttacagctgaggacctgcagcaacaagtgctttaccagcttcatttccttcgtatttaacgaagttcttgatgaatctctgagcaaggtcttttgccttaacatcccactcagcagcgtcagcgtatgtgtcacgaggatcaaggattcctgtgtcaacaccctcaagctctgtaggtacttcgaagttgaagtatgggattgtctttgtaggagctttgttgattgctccgttaaggatagcgtcgatgattccacgagtatctttaatggagatacgttttcctgttccgttccatcctgtgttaacaaggtaagccttagctccgctaacttccatcttcttaacaagttcctctgcatattttgtaggatgcagttcaaggaatgcctgtccgaagcaagctgagaatgttggtgtaggctctgtaattccacgctctgtaccagcaagttttgctgtaaatccagacaggaagtagtactgtgtctgatcctctgtcaggatagataccggaggaagtactccgaaagcatctgcagacaggaagattacattcttagctgccggtgcagaagatactggacgaacgatgttcttaatgtggttgatcgggtaagatacacgagtgttctctgttacgctcttgtcggcaaagtcgatctttccgttcttatcaagtgtaacgttctcaagaagagcgtcacgaacgattgcgttgtagatgtctggctcagactctttgtcaaggttgataaccttagcgtagcatccaccctcgaagttgaatactccgttgtcatcccaaccgtgctcgtcatcaccgatgaggagtctcttaggatctgtggaaagtgttgtcttacctgttcctgaaagaccgaagaagattgctgtgttctctccgttgaggtctgtgttagctgagcagtgcatggaagcaattcccttaagtggaaggaagtagttcatcatagagaacatacctttcttcatctctccgccgtaccatgtgttaacgataacctgctctttgcttgtgatgttgaaaagtacagctgtctcagagttaagtccgagctctttgtagttctcaactttagctttggaagcattgtaaacaacgaaatctggctcgaagttctcaagttcttcctctgttggctgaatgaacatatttgttacgaaatgtgcctgccaagctacttcaacgataaaacggattgccatacgagtatctttgttagcaccgcagaatgcatctacaacgaaaagtctcttgttagagagctctttgattgcgatatctttaacagctgcccaagcttcttctgtagccgggtggttgtcgttcttgtattcatcagatgtccaccaaactgtatctttggagttctcatccataacgatgaatttatctttaggagaacgtcctgtgtaaacacctgtcataacattgacagcaccgagttcactttcctgtcctttttcaaaaccttcaagttccggttttgtctcttcttcgaataataattcgtaggaagggttgtatacgacttctgttgttccagtaatgccatacttacttaaatcaatttttgccatcttacatatacctctttctttctagtgatagaataaaatgctgctcatgcaagcttttcatatccttttttaattatacatattatgtgaagaaaatcaataaaaatcccgtaaattttttaacaaagaactgggaaaaatgaaagatttcatattaaaaatgcaagaagaaaaaagaaaaatgtcaaaaaatgaaaaattacaaggaaaatatgacagattccgttgcttttttatatatcagaatgaaaaaaattatgataaaataggaggatgatgccagaaaatgcgaaaaaaactggcttatatagttagaaagacaaactgtgaattaaaagaaaatgaaaagaaaagcagacataacaatggtagataatgaaagaaaaacgacaaaaaatgaaaagatgtcgatgaaagaaaatgaaagattattgattgaaaaattcaaaacgataaaaccggtggagaaatcctatgaagaacaggcaaaaagacgatggaaaacagttgcaaaaccactgttcagcttaggaaaactggaagatgctgtgatccgaatggcaggaatccgaagagaagcagattttgagattaaaaagaaaggcttgctgatcttttgtgcggataatggagttgtttcagagggagtgacccagaccggacaggaagtgacagcaatcgttgcggataattttacaaaatgtgcgacgagcgtatgtattatggcagagaccgccggagcggatttatttccaatcgatattggaatggtgacagatgttccgtcggtgacagatccgaaagacaaagtgatgtatggaacaaagaatatggcgatggaacctgcaatgtcaagagaacaggctgcacaagccgttcttattggcatacgaaaggtcaaagagctggcagaacaagggtatgatctgatcgcaaccggtgagatggggattggaaatacaacgaccagcagtgctgttgtgtccgttctgcttgatgaaagtgtagaaaatgtgacagggagaggcgcaggccttagttcagaagggctgaatagaaagattcgtgcaattgagagagcaattgaaaagcatcagccggacaaggaagatgttttagatgtcttatccaaagtcggagggcttgatattgccggaatgacaggtgcatttcttggcggtgcgatctatcatattccggttctgatcgatggatttatctcttctgcagcagcattatgtgcagtacgaatggtaccggagacggcagattatatcctggcatcacattgctcgggagaaccggcggggcgaatggtcttagaagagctgaaacttccatatctgattgacgcgaagatgtctcttggagaaggcagtggtgcagttgcagcaattccacttcttgagatgggtgtgaatgtttatcggaagatgagtacctttgaagagattaaagtagagcagtatgaagaacttaagtgaagatgaggagtaagaaaaatgtggttattgaacgcaatgatcattgcaatcgcaatgtattctaagattccgatgccgcgggttgactggaatgaaaaaaatatgagatatgcgatgtgcttttttcctcttgttggtgttataatcggtgtactagaggcagttgcagggaatctgattacactgtggaagggagaaggaacatttctttgtgcagttgtgttgacgctgattcctgtctttgtaacaggtgggattcacctggatggattcgcagatacgatggacgcaaaaagttcttatggagaccgggagaagaagctggagattctgaaagacccacatactggagcatttgcgatcatcagtctttgctgttatttccttctgtgcgtggggatttttagtgaaatgagaacagaacgcctgtttgcagcagcactcgtgttcgtgttttcacgttcattgagtgggatttctgttgtgacatttccggcggcgaagaacagtgggctgctcaggacatttcaagacggtgcacagaagagaaatgtaaggattgtattgatcttctggctattggcagccggagttggattctatctgacagcaggtttatgcggagtggcagcagcagttgtcggacttgctgttttcttttattattatcagtttagcagaaaacagtttggaggtattacgggtgatcttgccggatacttcctgcagttatgtgaactgtttatgctggcagtgcttgcattattctagaaatgttattgcatataaatgttttatgatagatgctattattatagaaatgaaaatgaaataaaatagatttttttggagtgatttatggagcttattttgatccggcatttgaagacaccgggcaatgaaaagagacaatatattggaagtacagatgaagaactatcagaacaggaagtactgaactttaaacagaaatataaaatagatagctatccacaggtacagcaagtgattgtcagcccaatgaagagatgtattcaaacggcagagttgatttatccagaggtgcagatacaacaggaatcgttgctgaaagaatgtgattttggtatctttgagtgtaagacatatgaagaactgaaagacagagcagaatatcaggcatggctggattccggtggaacgattgcatttccggaaggggaggaacagaaggaattccgttcacgttgtgtgagaggcatgctctgtcaggttgatagattatgcaaagaaaatgtagaaagtgcagcttttgtcgttcatggaggaacgattatggctgtgctggaacaactggcggaagaccaaaaagatttttatcactggcaggtggaaaatggcggaggatatagaatgcttgttgacgaagaagagtggaagtccggcgttcacagattttatgaaattcaaaaactgggaggcgcgatagaatgaatgggaagatgacaatcttggcatgcattacaggatttctgttagattgcattttcggagatccggtctggatgtaccatccgatacgcgtgatcggaaacctgatcagtgtgttggaaaaaggattgcggaagttgtcgtgcagtcggatttatgcgtcagaacaagagaagaaaaacagaagagaagttctggcaggtggaattttatggattctgacagtttcgttatcctttcttgtaccggcggtactcttatttgctgcaggaaaggttcatccggcagtacggtttcttttggaaaccttctggtgttaccagatatttgcggcacggtgtcttgtaggagaaagtaggaaggtttatcagaaattaaaagaagacgacttgcctggtgcaagaaaggcagtatccatgattgtcggaagagatacagaaaaccttacagcagaaggtgtgacgaaagctgcggtagagacagtggcggagaatacttccgacggcgtgacggctccacttttatttcttctgatcggcggtgcaccgcttggattcttatataaagcagtgaatacgatggattctatgcttggatacaaaaatgaaaaatatctgtatttcggaagaattccggcaaagatggatgatgtatttaattacattccagccaggttgactgcgtggtttatgattgttgcagcatttttgacggggatggatggagagaatgcgtggaagatttatctgcgtgataagagaaaacatgcaagtccgaattccgcccagtcagaggcggtatgcgccggagcgcttgatgtacagttagccggggatgcggtttatttcgggaaagtctataaaaaggattatatcggcgatgcaatccgtaagattgaaccggaggatattcttcgtgccgggaaattaatgtatatgacaacgatactgatgatggttgtctttggaggtttattgttatggatttattgattcgatttgcaaaaatggaagatgcagaagaacttctggcgctctatacaccgtatgtaacggatacagtgattacatttgaatatgaagttccgtcactggaagaattcaaagatcgaatgcgtcagacgatgaaaaagtacccgtatctggtcgcagaacagaatggcgagattcttggatatagctgtgcaggggcattcaaaggtcgtgcggcatatgactgggcagtggaaacaacaatttatataagaaaagaccggcagaaaaccggagttggtaaaaagctgtatgaggcactggagaaagtactgcacgctcagaacatttgcaatctatatgcatgcattggatatccagagattgaagataaatatctgacaaagaacagcgcacagttccatgcacatcttgggtaccgcatggtgggagaattctatcattgcggatacaaatttgaccgctggtataatatggtctggatggaaaagcttctggatccggagattaaacatccaaagccaatcaaatggatggaagagaatcgcgaggaactggaggcagtacttttagattaaaaatgacatacatagagaagtaggggtaagattcatggaatatgtacacggaggagacatttatacatatggtgatgtgctggatttttcagttaatgtaaatccttacggtccgtcagaagaagttcttgaagcggcaaaaagatcgatggatgaagtgagcctttatccggacagtcaatgcagacggctcagaaagagactggcagagaaaaaaagtctgccggaggaatatttccttttcggaaatggagcagcggagctgttcttttctgttgttcttgcagaaaaaccaaagaaagcattgcttccgattccggctttcgcagaatatgaacaggcacttcggacggtagactgcgaaatcatttatcatgagttgaaaagagagaataactttgcattgacagaaagctttttggaagaactgacagaggatattgatcttgtatttttatgctccccatcgaatccgtcaggccaggtgatcgaaccagagttgatgaaacagatccttacgcgatgtgaagaaaagaagattcgtcttgttttagacgagtgctttatcgaattcctggaagaagcgcagaaatataccatggtgaaaaaggtgacagatcatccgagactttttctcgtacaggcatttacaaaaatgtatggaatcccgggattaagacttggatatgcgatgacatcagatgcaaagttgcgagagagcatgcagcagatccgtcagccgtggagcgtgtcggttccggcacaggcagcagggatagaagcgctgacagaaagagaagagcagagagttcagaaaatacgaaacaaaatcgtggaagaaaaaatgcgcatggaaaagaaaatgcgtgagtttgagattagatttattccaacaaaggcaaatttcttcttattatatagtgaaagcgcattgtttgaacgattgttagagcaggggattttgattcgaaattgtgagaactatagagggttgaagaaaggctggtatcggattgcagtgcggacaaaagaggaaaatgatgttcttttacgggcacttgaaacaatcctgtcaaagcagtgaaggaggcgaaaaatatggcgaaatcaattatgatacagggaacgatgtcaaatgtcggaaagagcgcactggcagcaggtctttgccgtgtcctgaaacaggatggatacaaagttgcacctttcaaatcccaaaatatggcgctcaattcttttatcacaaaagaaggactggagatgggaagagcccaggtgatgcaggcagaagctgcagggattgaaccggaagcaataatgaatccaattttacttaagccgacgaacgatacaggctctcaggtgattatcaatggtaaaccaatcggagtgatggctgcaagagagtattaccgtcataagaaggaatatattccggcaattatggatgcatatcatgagttggaaaaaaagtatgatatcattgtaattgaaggtgccggaagtccggcagagattaacctgaaaaaagatgatattgtaaatatgggaatggcaaagcttgcagacgcaccggttcttcttgtcggagacattgatcgtggtggagtatttgcccagatcgccggaactgtaatgcttcttgaagaggatgaaaaagcgcggatcaaaggaacgatcattaataaattccgtggagatgtatccattctggaaccgggacttcgaatgttggaagataagacggatatccctgtaacgggagtagttccgtatttttatttagatctggatgaggaagacagtctgacggaacgatttcagaaaaaagaaaaaccgggactgatcgatctggcagtgatccgattcccaaggatctctaattttactgacttagcacctttagaagcattggaagaggtgagcgtgcgttatgtttcatctccggctgagtttggaaatccggatgcggtgatccttccgggaacaaagaatacgatcagcgatcttctgtggatgcgtcagaatggattagaagcaagaattctgaaacacagcgcacagaacaaaccggtctttggaatctgcggcgggtatcagatgcttggaatggaaatctcagatccaacaggagaagagtatggaggaactgtacagggaatgggacttttggatacaaagaccgtgttccgtccggaaaaacacagaaccagagtacatggaacatttggcgagatgaaaggaatcctgaaagagatggagggacttcctttcgaaggatatgagatccatatgggagagacgattcttgatgagcacgcatccgggcttgtaacaatagaaaatgattctgatacgctacaacaaggacatccggatggttcacagaaggaaaatgtctatggctgttatgtgcatggaatttttgattctccggaaatgtcaggtggtttcttgtcagctttattaaaagaaaaaggatatgatccagagacagtacaggcagtagactggaagtcttataaggaagaacagtatgataagcttgcagatatcgttcgtgctagtctggatatgaaagaaatttatagaattattggattgtagagtttgtaatgagagaggggaaagtatggttacagatttaacgaaagaacatccgaataagacattatggcggttccttctgccaatgttgttcagtgtgatgttccagcagatttacaatatcgcagacagtatgatcgcgggaagatttgccggagaaaatgcgttggcagcagtcggcgcatcttatccgatcacaattattttcatggcatttgctgtgggaatgaatctgggggcctccgtagttgtatcaagactgttcggagcggaagaccggggcggtgtgaagcgtgcggttacaacagcatttcttagttctatggtgctgggaatcatgctgacattattcgggtatttctttaatcatcagatgatgagatggatccgcacaccacagaatattatggcagacggagttttatatttgaaaatttacattttcggaattatcttcctgatgctttataatgtgtgtaccggagtatttacagcactcggggattctaagacaccgttatattttctgcttggttcctcagctggaaatattattcttgattacatcttcgtagcaaaattccattggggtgtgagcggtgttgcctgggcaacatttatcgcgcaaggtgtgtcagccgtgcttgcattagtaacacttctcggaagattgcagaaatttgccggggaagaaaagcagccgtggtttgataagaaattatttgcacagatcatggcgattgcaattccaagcattcttcagcagagcgtattgagtgtaggaaatctttttgtgcagggaattgtaaatcaattcggttcagcagttgttgcgggatattcgggagcaatcaagctgaatacatttgccattaatatctttatgacacttggttcctgtctatccagttatacggcacagaatatcggcgcgggaaagaaagaacgaattccattgggattccgtaccggagtgaaattgtcagagcttacggcattaccgtttgttattctgtatttcattttcagtcgtcagatgatggggctattcttaggtgcagagagtgtagaggctatcagcgcaggaatggcatttttgaaaatagtatcgccgtggtattttatgattgtaattaagctgatgacagatggaattatccgaggttccggagcgatggtttattttgtagttgcaacagttccggatcttattttgagaatcggatttgcgttggttttgacaaaaagctttggaagtaccggaatctggatggcatggccatttggttggatcgtagcaaccacattaacattaatcttttatagaaagttgggatataagaatgataaaagcagtgatttttgatatggatggggttttgatcaatacagaaccgcttcattatcaatgttgggtagagatttttaaagaacgatatggaattgacttagattacgatgtatataaaccatgcattggatctacaagactccatttcatgaatctgatcaaagaaaattacggaatcacatttgaaagtcttgaagttatgaatcagattatgaaagagaagaaagatgaaattattgcgcgagacggattccctgagatgccgggagtagggcagatgctttgctgtctgaaagatgcggggtatcgcctggccgtggcctcttcttctccgaaacctgtaatcacagagacactggaaacgctggatctgatgaaatattttgatgtcatgacaagtggagatgaagtgaagaatccaaagccggcaccggatacatttctctttgcagcgaagcagctgggcgtaccggtagatgagtgtattgtaatcgaagattcaacgaatggaggaaaggctgctaaggcggctaagatgccatgtatctggatgcataatccggattccggagaccaggagataccggatgcagtgctcgagattaccgcctggacaaaggagaatatagaaaagatcatgaaatttttacattttgatcaagaaaaagtgtaaaaataaatgagcgatataaaatttttttgagtagaatacttagaaatagtagacctggaagtattattaggatgtgattgaatgaaaaaactgaaatttatataattattcctctaactttccccattttacaggcttttccgcctgtccattagtgaaatgatatgtagtttcccttatttttgcccttatgagataatcacaagggaaataagggaatttttttagtcattacctaccactttatcaagaagccgaaccgattttcgtttcgcatctcttgtggagtgagcatagacattcattgtggtactgacatctgagtgtcccaacaattcctgtacatcttttggggctgctccatttgctaaaaggttgcttgtataggtgtgacgtaactggtggaaatgaaagccttcaaatccctctaatgcttttgccacctttctgcataccgtccccaaagtagtcggaagttccagacaaccatccggtcttaagcagacaaaagaaatttctttataatctgccgggacttcctgcgttctgtctaagcaataatattcgtagtacactctgtttttctctttgacctctttgtagtagttcgtgtgataaagttcttcgtactgcattcgattttttaactgctctttccgggcattacggaaaatctctaccagtgtatctccaaaatcaacaacccttacttttttccgcttggttggtccgatgatatatttgcgctttgagccatcatatcggatgctgcgtcttatggtaaggcattgttcttccagatttacgtcctgccatgccaaaccacaggcttctccaatacgaagcccggcataataggctatctggattggaagtattgcggctgggttctttttttgcagataagcaagcagtctttcataatcttctcgtgaaattggttggacatttccgtccatatcctcatcagaaaacaaatccacttcatccgtctgataccgcagtttaatatactgcataggattgaacgtaatatactgctttggaaatactgcaaagcggaatgattgctgcatgactgcggaaaaagaatggatgtaatctttgctgtaaccctttctctcttttccatcgggatgaactcccccgaaggaaagcaaatcgaagaaagattgcaaatgttcagaggttacatttttcagtttacgttctgccaatgggtgtttcttaatatttcggattgttccgaggtaattctccaccgtaccattgctgagcgtacctgtttttaattcctcctctgcccacacatccaaaagctgtccgactgtgagattatccgctttggcaacaaatttctttttctcataatcatccattgcctgacggagcagtttttcagtttcacttttgctttctgttccaacgcattctttctgaacaagattgccgcttgcgtcctctacatagaagcggtagtaccatttctttcctttttttcttacagatccttttgccataatcgtatgtctcctttcgatattagacaatcggaactgatgaaatgcttcgtgcgtgtaagtatatcataactccggttgtcttactataccgattcggaatcttcgtataagacttctgataaaagatttgcaagcctttgttctgctgtttttggtttcttggaatagagccttacaatgtctgccatctcattaaaagcattgatggtatgagtgatttcccttaagaacataatctcattatattcctcattcgattcaaaccctattgttttggcaatatccgtctgaccagcatttcccttgaagtttttgcaggcgaactggaaggaatccaaaaacagaccatattgttttaacatcagcagtaataaatcttttgaaaaagcatcttcttctttggtaagggcaagcggtaactgttccagaatatctcccatcgcatcacgaatctgtaattctctcttatccgtaatgtcggtttcatattcatctgtttcccctttgagccattccacagatacatggagtgcttccgaaagaccttccagcaccatttttttcgtattgtcaatcgaaccattctcataacgcaggattgtagaagcggtaactcccatcttctctgcgacataaggctgtgtcagattcaattccagacggcgctgttttattctgctgcctatcagcttgcgtaattctttatctttcatgctgactgcctcctttttcggtatgtatgaattatagcattgtttttccgaaattgcaatatgcaatgcaatatttatttttaacatttcgtaacgcttgacaaaaagatgtgaaaaggatatacttacatcacaggaattgcataatgcaatttataaggaggtgattatatgacgcaaagaaaaattgcattatccatcgaagaagctgccgactatacgggaatcggcagaaacaccttaagacagcttgtagaatggaagaaacttccggtattaaaggttggtcgtaaagtcctgattaaaaccgatattctggaaatgtttatggaagcgaatgaaggtcgtgatttgagggatagaggaaatgtaaaagccgtaacaagaactgcggcaaattaaaaaggcggcttcccaagaaaccgccaaaggttctatcaaaccgaagccatgatatacctacacgcaagaagattataccatgtgcttcttctgatacgcaaccaagaacttatgtttgtgaaggaaaggagaatgtaagaatggcaaaatcaacaaaaagttatgaagcacgaatgcttgaaatggaaaagaaagagcaggaaagccttgaaaaggcgaaacgatatgcggcacagaagaaagaacttctgaagcgaaagaaagccgaagaaagtaaaaaacgaacccataggctctgtcagattggcggtgcggtggaatccgttctcggtgcgcctattgaggaagaagacatcccaaagctgattggttttctgaaaaggcaggaagccaacgggaaatttttctcaaaggcaatgcagaaagaagtcaataccgatatggaggaagtgtaatggcggaggggatgagtttttcattcccttcattgctttttcatgaagggcgcacttatggacaaccagaggtcgtcccaataagtttgccacaagtggcaaccggtctgcgttcacgcttgccgggctcgttccgtcggcggggctttcagccagacctgctcatgccgcaggaggcactcttcgccagagaggcgcattccatgcaggctgctatgcgcagggcactcttacgcagagggcgttccggcaatgctgcttttcctaaaaccgaaagcaatgttgccggaaatctatgccggatgtgcagaaaggaggaatccagacatggcgatttttcattacacagtcaaaatagtcggacgaagtaaagggaaatctgttatctccgcttccgcatatctcaatggggatgtgatgaaaaacgaggaaaccgggagaatcagttattacacttctaaaaaagaagtggtctacactcggctgatgatgtgtgaaaacgcacctcctgaatggcagatagtaccagaagaaaatataaaacgctttcaaaaatctgtccgatacaaaagatcagaagataaagaagctgctttagaaaaatttaaaatcacatttcagaaacaaaggttatggaatgaggtattgaagattgaaaaaaatgcagatgcccaacttggcaggtcatttgaatttgcccttcccaaagaatggaacagacaggaacaaattcaatatacaactgactatattcaaaaaacttttgtagatagaggaatgtgtgctgattggagtatccacgataaaggggatggcaacccccatgtccatctgcttctgactatgcgtccttttaacccggatcattcttggggaaagaaagaagtcaaggattgggattttctcagagataaaaacggaaatatcgtgattgatgaatcccatccgaactggtggcaggataagaaaaaccctgaccgtcatggaatccgtatccctgtattagacgaaaacggaattcagaagatgggtgcaagaaaccgcctgcaatggaaacgggtgctgaccgatgctaccggatggaacaatccaaaaaattgtgaactgtggcggagtgaatgggcaaaggtgtgtaatgaacatcttcctttgcataatcaggtcgatcaccgttcttatgaaaaacagggaaaactccagattcctaccatccatgaaggcgctgacgcaagaaagattgaacaaaagtttcttgccgggcaggaaataaaaggttcgtggaaagtagcggaaaatcaaatcataaaacaacaaaacacgttattgcaaaagatactggacacctttggaaaagtatcgggtgcattatcattatggaaggagcgattaaatgacattagaagaaagccgggaaattatacccttaatggaatccatgattgggcaaatcgaagaacagcagaccttaatggcagaaatgattctggaaatgcagaaccgggacacccaactctctcttatgcaggaacagaatcagaaattgcaaaaattaaacagcgagttatccgagctgctcaacattttgccaaataccgaggaactgctttccaagatggaagaacagaaaacgaagatagaacttttggaaaacgaaaatcagcaatggcagaaattggcacagactctgaacagcgaaaacagtttattgctgaaacagaacaccgaattgctgaactggaacagcaaataaggaaaggacgtgatatagatgaacgaatccagagaatcaaagaacgccgaacagttggaagaacttctgctcttgaccgaggagatacaagaagaactggaacagaaagaccagcttatcgaggaactgaagacgcagctcagcgaatctctgaccttgaacgagaaattaaacaaagagaacaaagccgggaatattcaagcattaaagaacgacttgaagctggcagacagagcattgcagatcgagaaagagaagctgcgaagcgcaaacgtcatgatcggggaatgtcaagataaaatacgatgcttaacacaacaacgggattatgcccggacacatcagaaaatcgtagagataccggtagaaaagccggtactctatgaaaaatgtgaagcctgtgaccggacagactatcagaatgcaaaagcaaaatacgaaacacaaaaagagcgacttgcaggacaatataaagcaaaaacggtaatgttccaaacaaccttgttccttcttgcatggtattcgctgacaaccactctttttcaggcagtacagtcagatgtgctcctttccgattgtaaatcattcttccatgatgcagcgtcattcatacaaacttttatcggatggacgattgatgctgggcaatctgtggcacagatcagtacaaaaattcccaatgcgtttatagccggaatcatatattggttattgctgatattagttgttggaatatacgtagcaggaacagggatacttgcgatactgatagaaataaagattatagaattatataagaaaaactgttgggatgttattactctactaatgatactgacaagtgctgttgtcatcatttattttggagaatcaatcaaaaaagtaatgcccataaatcttttgtttcttttattatttatacagggaatatatcttggaatccggtgttatctgaacactctttactggacaaaccgataaaagaaagggcggcagtattttactgtcgccctctggttacttataaagattgggtattctctctaattctattgctatatccaatgatactaaccactaaagaaattctaaaaatcctgattataaatctatcttctaatctcacttatgatattctcttttcccatcttccaagccggaaacattactgccactactgcaatcactacattcagcaccataattccattcagaaccagattcggaatattagtagtataatgtaaaaactgcagcacatgagccagataataattcatcactctgcgaagaactctgttataaataagatagataaatacatccgccaacaatccatacagaatacctgtctgtaaaatcatcttgtaaaatccgccgtccgtaatccctattgctctgataatcccgtactctcttcttctggtcagaatcgtatgactcatgctgtttacgatatggaacaggctgataatcagcagaatcactgcaatactggaaaagaagatctgctgctgtccaagataacctttctgtgttgcaattgcggtcgtataatcctgcaatactgccttgggaacatctcggattacttgtaataactgattgctcacgatctttgcatccgcactatcagccggcgatgcattgataaaactataatctgtaattccaaagttttcttccatctgttcgcctgtcataatcacactctgcgcatttttccagacttctgtattcagaaaatctttctcctgcgccaacggtctgtttacgattgccgcaatctcaaactctttttcaatatagttttcttcgccactttggaattttaacagttcatctgtatagttttctgtctttggtactcgaagagtaatggtatcgcccggcttctttccataaaaaaagtaatttccctgaccgtccatattcgccgtcacaatcacttgattattattctttattgtttccggctgaatctctccctccagaataaaatcccgaagctgttctatcatcgcttcatcgtaaccgtacacattatatttaatccgataatttccatcttcctgctgcttacagatcccatcatatctctggatataatacggctcctgattttgatatttgaaatagtcactccattcttcttctgacaaaaattcgtttttggaaatctgtaattcccccatcgtatactttgtcgcatatacattctctgtttccggcatgtttttaatcttatctgctaccgcctccggaatcgtatccttcagcgagtcagattttaaagaaatacggtactcagaaccaagcccatcatccgatatcagcgaaagttctgcgtgaaccttcaaattttctaccatataggtggtacataagaaaatgcaaccgccgatagacaaggataataaaatccctattacctttcgtttattggcaaacatgaatttccgcaccactacatttgccatattaacatttcgcatagcgtatatttttcttctttttacaaaagaagtatctccactcatcacagttttcagcgaatctttccgcatggaacgaaccacgagaaaggcaacgagtgctaacgaaatcagtagaaatacaaaaccaaacacaacagcttcctttgaaacaaaaaactctactgtattttctccttctgctaacgtatggtccgcaacagaaagaccattccctgctccactgattccttttccaccaaatacaccgctaaatttctgatacataaggcttaaaacaccatttcctaaaagacatcctaacggatatccaatgaaaaataacgtccaaagttccaaaagtaaggtgccaccaatctgcgcttcactgatacctaatgtctgtaatattccgtactcagaagttctcttcgatacagaaatactgaatacgctgtaaactacgaaaagactgaacagacataacaggaaaatcattccgttgtaagccagattgtagtcgctctgcaatttcaaaacgatataagtgaagtttccttcttcttcaaacagaccaaatttcacgatttcagaaatgctgcttggtgcttctccgccaagatactgtattacttcatcattttctgctaccgattcagaagataatttatgttcctgtaaaaaagcatccaactgtttatataacttctcatcttcattaaaactgagatataaaaacgtctggcttcctcgacctttaaaagaatcacttacaaaaacttccatttcactggaacttgccgcccattcgcttttcagaacaccagtaacaatatactctttttcaccaatgcgaagggaatctcctaaattccctgaaaatccaagattactaagcacaaatccatccgctgcaatttcattttctttctcagggaatgttccttccaacaagtctctgtgtgccatttgacgataagtttcatcggcatggataaaacagatcataaattcttctgccacaacgtcacggatttccatttttccacactgttccagcgtatatccttttcctttctcaccgctttctacagaattaaaaagttccttatccgtttcaatataataatgccagtctccgtaaatagttttgctgttcgccagatcacttttctgactgctgtaaatcaaagaagaaatcccggaaagcaatgatgctgttaataaaatactcgcaaaaattgcaaatgtctggctcttgtaataccgcatatatttccatgccagctttaacatacgacatcaccgccttttgccggaaatcttctctttcctgtaacaatctgaccatcttcaatatgaattactctgtcgcaagtctgtgcaatggcttcattatgcgttaccatgagaatcgtctgattgtacttacgacaactcgtttttaataaccccataacctcaatggttgtggctgagtccaaattacctgtcggttcatcgcaaagcaggatactcggtttatttgccaaagctctggcgattgcaactctttgctgctgaccgccggataattcgtttggatatttcttgcgtttctcccaaatgcccagttcccgcaacaattcttcgatatatttgcggttaatatgttttccacagtcaaatgtaaccggcaatgccacgttatcatacacattcaacacaggcattaaactataattctggaatacaaaccctatatttcttctacggaaaatcgtcagttcttttcttgaaagagaaccaatctctttattctttataaaaatctgtccacttgtcggattatccagaccaccgattaaattaagacaagtagatttgcctgaaccagatgtgcctacaatggcaacaaactcgccttcttctacttttagattgatattccgtagtgcctttacctgattatctttttctccatatattttctcaacatttcgtaattctaaaatactcatccgtcatcactcctcttttcttgatacatccagtataactgccgtatcttgcaatttctttacaaacggatgattagttcttacagttttgtaagaacacagaaaaacagcttccctttccatactcggaatctaccgtcatatatcctttttctttttccaaaatcagattagaaagatacaaaccaatcccagaaccttccatattctcaacttctgggcttctataaaatcgtttgaatatatcggtcatttcctcctgccggataccacgcccattatctgcaatctgaatctctgtgtataaatcataactttttacacaaatggaaatagttcctcctctatcggtgtacttaacagcattttccaacaaatttacaaatacttctgctgtccattttcgattatgatacagtaatctgtcctcaaatggttccaatgtaaagttgatttcctttttttccagtttctcataaagcgtatctactgcgtctaaaatcgtctgcttgatccctattgcttttccttcaaagccatcaatattttgctccaattttaccatcttcgataaagactccacaatccaactcagcttgtcaatctgtcgttgcattttttcagaaaacaatgttttccgttctgatgtaatttcctctttacttaagatttctgcatagagagaaatattcgctaagggcgtttttaattgatgagacatattagataccagacttttcacctgctctttttcttgttcggcactattcacgtgattatcaagcacttcctgtatctgcttgattttactgacaagggcagaatattctccttcttccacatcagaagctgcaatcatttcccgatttaacacactgtccagcaaacggtcaatcaggcgatatgtttttcttttttgatatatgctatatccaatcgacaaacacaaaagcactgctaaaagtatcgtaatccacatctctttattccttccagatatatccgattccatgaactgtttgaatccattttggtttcgatacatcatcctctatctttgtacgaagcctgctgatattcacagacaccgtattgttatctacatattttccatcactatcccatatcttctctaaaatctgctccttagaaaggatatgattcttattttcaatcaaatacaccaacagacggtattccaatttgctaagagagatttctgaacctcttttatatactttacaagtactctggtctatgcttaatgaacctgtaacaatctttgtactttcagatttttcttgaagtatccgcttcattcttgcttttaatacacccagagaaaatggttttgacaagtaatcatttacccctaattctaaagcctttatctcatccatttctgtatcacgagcagtcagcataatgattgggatattgctgtagctacgaacttctttacagagttcaaagcccgttccgtccggcaggttacaatccaaaaatacaatatcataaccaccgtttgcgatttcttgtaaaccatccttttttgtccctgtctctgtcacatcatatccatcaccagaaaaggagaaggaaagtccctctctcaaatcaacatcatcttcaactattagaattttatatttttccatcatgtatttcctttattgcttcatatcaaattactgctttttacttcatatttcattatacagtaaccaccctcgttgtaaagcaaaaagcaagccatttcagacttgctttccaccatacagttttaaaaattaaactctattgtaaaatgcgtattagcaatcatcttgcatcttaagaaccctcaagaaatgagatagatctacaacaatatttcacttcttgcttaataaagttctaatgaatcttctgcatccacccacatctgtaaattgccatcaagatataatcttgcatattccaaaggctcatccacagccaatgaagtaagcgcacattctgatccatatgtggtttttaaatttttttcagcttcccagcaatcaatgcgaagcatatatccggcacttgtgtaaacatcaatactatcgtggtttatgttgtattctgcataaattgttctcatcgtatcttatctccattttcttttgataatcagttataaagttaaatatcgaaaacatttcaatcagttcaccatgtcgttattgttatatgttatattgtgttatgaaattttctttcccttaatttttcccatattaaggttcataaaaaccaatgggagaatgtaacacaagggaaagagtaagggaaagttcacttgctacaaacttagtattttcaagggtttgcgaagaatttgataatcaaatataacagttattaaatttcctaaaatatgtgaaatatcaactggaatttatatttggcaagcttagtattctctattacattttgtttttgctcgtgacctgtgtactttgcaagtacggaagcatcagacagctgaagtttgcatttttggctttaggtatccttctggtactcagtctttgtatctggatcggttgcctgatagcagaaaaggaaaatcctttaaaaatgaaaggcgcactcaggaaaacagtgtttggtacagaacttttgattctacttgtagttacggttggatgtatttcttatatcgtatatactgcgattccttataatggcgcattgtcctggaaggtagacagcctgtttaagacaaagaaaattgagtatgaacataacaacttctttcgtgatggcgcagaagggctgataaaagatgtcaataagaaattgaaacttccggacgagttatatatcacagatagttttgagatgtcctttgataaagacggaacgataacccgcgtatcagcatatctttatggacagaatgaaaagggaaaagacaagacctatctgattgattatgatatagataaaagtgataagattgttgtgcagattgcaggttatgcaaatgcagattatgatgatgacaagaaattagatcctatgtttaccattctggaaaaatcagattgtaagatgcaggtgacacaatggaatctggattatgcatttgcagataatccgccagaatatgagattctgtattatggaaaacgctccttcgcctcttcggaaggtcttgtttatcttccgggagatgtggatggtgacggagaagtcggcggcatgactgatttcacagcactggatagcggcggagaagcacttggatatgaagtgtctctgtatcttccgcaggatgaatctgtgactccggtgcgttacatgatggaaccagaatatatcagtcctgatacgattagccagaatgagcaggcagagaaagattcgcaggcaaaagaacagggaaaagagaataatacctggacggttgatacggacggaagcggagttgtccgattcttcttaaacgaacagaaaggctggaaactttcagttgttgatgcggctcttggaacacgttattacaaactggaaactacgtcagatggtgggtataactggacaacagtaaatgaagatccatttgacggaaatggtggagtaggagaagggatacaattcttcgacgagcagtttggattcatcggtctgagtggggcatcgcagacacattcatctatttatgttacaaaagacggtggaaagacactgaaggagatagaacttccgatggatactgtgacagaatatccgctgcatatgcaggaatatggcttcacgcttgaagattatcagtatctggaaatgccacagcaggatggagagaattacacgattcatgtgatgacgcagagtggcgagacagaagggcttgtattcacatctgaagatcaaggtgagaactggatctttaccggagtgtttgatgaaaatgacttatcataaaaaaccaataactttgtagtatatcaaatggctccgcgtgtacatctaaaaactattcaccaagctatgtattaaaagcaatggaaattccagaggaagaaattgagtgctctgttcgaatcagttggggaccagatacttcagaaaatgagttgaaggaaaatttggttaagttgatagagacagctaagcagataaaaggttaatgtcagggaggcaatatggatcctgaaatgaatatgagaattatatataaaatatgtccggaaaacgaggatcaaggaaaactagatcaagcaagagccttgtggagagcaacggtggatatacagataatttatgggtgccgcattacggcacccataggtaaataaagggaaatagatttaacccatcatagcttcttttgcttttgcaatatcagcagcatctttcattgggaagagtaagttggcgataatcgctacgatacagattccagttactgcatcactgaatacgaacttcaatacggatggaagctgtgccactgcatctggatggagagtttaatgattcaaatatttgttgacttcttgacgacagttgtatatagccttttcttcgtcaattcctgttagctgaccttcttttactacgatttttccattgacaatcgtataatcaacagtgcccttgaagccgactgtgccgagcatggattttacatccaggtcggcccctacaagctcaagacgatttctccgaatcatgaataagtctccagctttgccgattgagagagaaccgatatcgtttctgccgaggattttagcgctgccgtttgtggcaatcttcagaagatcatatccactcggagcaagcttgcttgagttcagtctgtgcaacaggaacgctacacgaagttcctctaacaggttagaaccgtcattgcttgcgcttccgtctactgcaagaccaaccggtacacctagttttaacatatccggtatccgacagataccggaagaaagtttcatgttggaaattgggcagtgagctacgccggttccggtctgtgccagaagattcagttcctcatcattaaaatgaattccatgtgcataccagacatcatttccaacccagttcatgtcttccatataggcaagcggtcgtttgccgtatttctcaagaacataattctcttcatcaattgtttcgcataaatgtgtgtggaggcgtacgcccaaatctctcgcaaggattgctgactgacgatacagttcttcgcttgcactgaacggagagcatggagctagagcaaccatttccatggaatttggagcaggattgtggtatttctctacggatttctgagaatctttcaagatcttatccacgttctgtaccacactgtcaggcggaagcccaccgtctttcttgctcagatccatgcttccgcgggaagcgtacatacgaaccccgagctctcttgcagcagaaaactgtgcgtccagaagcgcatcggaattaccgcccggaaatacatagtgatggtcaaaacaagttgtacatccggattttaatagttcacccattcctgttaaggagctgtggtaaatcgtatcctgattcagatttttccaaatctcgtacaatgttgtaagccagtcgaacaattccatgttctgaacttgcggaagatttcggctgaacgtctggtaaagatggtggtgagtattgattagtcctggataaacgagacatcccgttccgtcaatgacttcgtctgcggtctgcggttctattccgatgtatgtaatgatgccgtcttgcatcaaaagattggcatgttctaaaacagcgtcctggctgtcacaggtaacaattgcatccgcatttttaattaataagctgctcatattacaacctcctgtatttgttttattctttgttaataacaaagatataactgttgaaataatgacagaaatctcgcgaaatgtataagaagttcaattctaaccgccggcgaaaatatgggaattgataaatggatgacaggatatttatgacaaataaaaaactgccgtgacaactgactgcaaatttttggtttcccaaaaacttgtagtcaactgttacggcagttggtagacacgctcatcctatcatgaacttatacaagtcaatttctatgatgtaatatataatggatttagtggtgtgtcaagggaaaattaataaaaacgtcaaaaaagataaataagagatgggaaattggttaaagtgtacaatgaagattgtgattagttgataaaacatcaatatcaacccaagtacggtctcttttgattatagaataaatagtctgcatctctattagaattgaaatatcaaaaggaaagtgttagaaactattaatagtacaaagttcatttaagaagttgaaaggagaatttctatggaaaagaaaggttacagtagcagaagctggtttggatctgtaaatcattatgattcacatgggaaaaaggtagggcatagcagcccgggaatgtttggttcgatgaatcatttagaggtaacattagcttcaaaaatccgtaggcttcaaaatttatataacagaatttcggtggaaagtggatacagagagcaagttatggataatacatatatggtaaatgatttgtggaattacagcattggagagtttatactttgcgaaggttttccggatcatatgcaggagagagaacgaaagacacgattcaattcacaaaagactattgtgattttatccgcgaattcagtgcgtatctattgtatcaatttcctgatttagatgttttatcagttgaaaagaagttgattaatgatatgttggagcaaagcaatatatttttaggaaaagatgatccttatgaggattatcaaatgccacagtttgtaaatccgttgctatgaacggagatgtataaacaaaataagagagcaaagggacaggtttggataataggatctgtccttttatagaataaacagggatttttattgcacagttccagatttagactatacctatcaaataaaataaatgaacagattttgaggaatggaggaactggcaatgaagggatttaatacaagtgatggatacatgggattggtagaaggcagatatattttatttgccagtgaatctgattactatgagtacatgaatgattagtccgaagggagaaaacgaaatgtttttaccaggattagtagtggcgggaattgtttacttggtatattgcatgatctataagtaattatattgttcggcgtatgagtgctggtcgtttatatgacaagatcggaaagagcgcttatgcaaaagttgagttggtaacaccagtaggaacaatatgtaaggtttgtaaaaagagcctcaaaaatgaaaagaaggagatggagataacgaaaaatgtgttcatccagaacatggtgtgattgattattttatagagaatctgacaggtataaagaacagccaggttaaaaatgctcctaagctggaagaagctctgggacgagttgagattgaaccggaaggtaacttccatgacggattggatgatgctgttaatacaggatatctaatagaaaaattggaattgaatccagagtatcaattggtaagttacgaaatgccggataaaccgtcagagcgcttgagcagtacgcttggagaactatttgctgggttggatttgcgatttacataataagatgcactatatgtcgttgcttatgatatactaattctacagctattcaatagtttggtaaaaaagcagaatatatcaagatcaaaggcgaaatgaaggaacttgatgttggcagggtctttaggaaaatagtaaaacaatatatagtgagatgctgcgttatagattcagagctatatcaagtgtatttaaatgaacttaaaaggttggcgaaagaagacgatgtaatcatagacgtgattgcacgcagacggtttgggaaagaacccgttgaagaagtcgctgtaccaggggtgattaaagtttatcaagacagattttatatggaaaatcagtggaatatatgtgttaaggctaccgtaattgtggagtaacaggggagtggattagatgaaattattaggaaatatactttggtttctttgtggcgggataatcggaggtcttgcatggatcattgcaggatgtatatggtgtgtcacaattgttggaattcctataggtttgcaatgtttcaaatttgcatccttagcattttggccttttggaaaagaggttgtatatgggaatggaaccttctcatttcttgtgaatttaatttggattgttttctttggatggggaatggctcttggaaatattgtcttaggatgtatgtggtgtatcacgattgtaggaatcccgtttggaaaacaattctttaaaatggcacgtttgtcttttatgccttttggtgcaaatgtgctttagaacaacctttttatataaaaaacagtcaggtgaaaatggctccgaagtcgaatgcagcactgattcatatgattgactggctgggagagtgcgaatatgaaatctacgcctggagctgaaatcgagccagagggtaactttcatgatggattggatgattctgtaaatgcagtttgtctagatacaggacgggaatattatgttgaaaaatcttgaaaataaggtgggaaaacgaaatgattgatttacaatatgcgaagaaagcttttgaaaactatttgaatgattatgaccaaaaaaatgaaaagataaagttgaagattgtgcatacttatggagtgatggaatgcagtaaaaaaattacagaagatatgaaactgtccgcagaagattgtgagctcgctcagattattggattgttacatgatattggaagatttgaacaattgaaatgttacaacagttttgaaccgggaacgatggatcatgcagcattcggtgtgagaattttatttgaggagagactgattcggcgttttgtcgaagaaaataagtgggatgaaattataaaaacagcaataggacatcatagtgattactgcttaaaaggaattacgaatgagcgagaattgatgcatgctcaaatcatacgtgatgcagataaacttgacaattgcagagtgaagctcgaaacagcaattgatattctcatgggagttactgcagaacaggtaggaatgtcagaaattacgccagaagttatgcggcaattcaaaaatcataaatcagttctattagagacaagaaagacaaagatggattattggatatcttatcttgcatatttttatgatataaattttaaagcgacatatgaaagtataagagataaccattatgtggataaaattataggaaggattccgtatacaaatccagatactggaaaacagatggaacaaataagaaacgaaatgaatctatatattcaaaacgctataaatgagaatggaaattacagataaatataattgagattttgaaggcggtttacaattttaagcatagaacagaagatgaatgatatatgtaaggtggtaggaaatgggttattacataacaggagattgtcatgcacattttgataagttaatctggttggcgagatttaataaaaaacttggaaaagaggatgtgatcattttattgggggatgtcggattaaactattttggagctgacaaagatcgggaaaacaaaaaaaaacttgcggattttccaaattatttcctgtgtattcatggaaatcatgaggaaagaccttatcatatacaaacttacagaacacaaatcaggcgtggaggagaggtatattatgagccggaatatccgaatatattatttgcaaaagacggagaaatttatgattttgatgggaaaaaggcgattgcaataggtggggcatatagccaggataaagaataccgacttataacaggtcttccatggtttccggacgaacaactagatgacaaagtaaaaagtcaagtagaaaataaatctgccgacagaggaatggatggatgaaattgtgaaaattgagagggaggaaggataggtgcatttttatattacaggtgatacacatcggagctttgatcgtattgaagatttttgctatgaatatgaaactacaacagagtggtatgcaggacattatcatgtggaatgtgaagaaggtggagtccggattatgtttgaagagtatgatgagattatgtagggcgaaataatggaaattatgtatatttgataggaataatatagccctatggggaacttagtattatggggatttatacagatgagaaactagtgatagaggcttatgataaacttataaacgaagatggaaggtgtacggctttggaatatccggaagaacctgaaatatataaaattccattaaataaatttcttggagaaaaagtgccatgggctgagatgattgatggaaaattttgcttttatgcagaagataacatagagaatcttacgatcgatcagattagatcacatgtgaaaagtacaagcttttaagcaataactatgatatggagagcgatgcgtaatgaattattatatcagtgatttacatttgtttcatgaaaattcgattaagtttgatgaaagaccatttgacagtctggatgaaatgcacgagacgatcaagaaacgatggaatagtaaaataacaaatggagacagggtattcattcttggagacataagttatagaggtaaaaatgaagatttgattgcttatatttctacattgaagggacaaaaaatacttgtgaaaggaaatcatgatgatgtgtcggattatagatatcatcagctttttgcagaaatttgtgattataaagaaattcatgattcagctaatggaaagagttataatcttgttttaagccattatccaattttcagttggaaaagaatggggaaaggattctttttattatatggtcatacgcatgacagtaatgaggatgcttattatcaaagctgtttaatgaaaatggtggaaagtgattgtcaacatgtgtataaaacggaagttagagcaataaatgtaggatgcatgaaaccttggatgaattatgaaccgcgaacgttgacagaattattgtcttattcgcaatgaattagatgatagaagggagacagttttatgtctacatatgttatttcggatattcatggacagtacaacatgtttatagaattactcgataagattgatctaaaagatacggatactttatacattttgggagatgtacttgataggggtcctcatcctattaagacaataagaaagcttatggaaatgccaaatgcaatatgcctggtcggtaaccatgaatttatggcgatgaaatgtctggaatttttgatgaaagaaatttaaacagacgggaagaatttaaaatgaaggggaaaatagcagctttaagacccgtaaatgttggatctgtcacatcaatatgtgttcggatagcctgaacaccatgcagcatctcttttcttattaacagtaatgatttgaaataacatcattattgttatgttgctatttgttctttacgcacaaatcatagcatccggtcagaatacagtcaataaaatgcaaaatcaacgcttttattttattcttgcgtacaaaaaaagtcaattcactttgtgcgttacacacaaaataaaccggacagatgtaaaagcattatctcctgaaaaaacgatatcataaatatttttgcgagtttcctgtaaggagtacactgactcaaaatctcttgcaagtatatcgctgtagcgatatacttaatacataaggaggagctggtatgaaaaaaatattatatcatggatcagaattcttaattgaaaaaccagagttcgggaagggtgccagacacaatgattacggaagaggtttttattgtacagaaaatatagaattagcaagagagtgggcatgtgcaaagcaaaaaaatggatatgtgaatatttatgaattggacatggaaggattaaaagtattgaatctgaatgattcaaaataccacatattgaattggcttgctattcttgcagataatagaacgtactggcagaatggaagtattgcagaagaggcaaaaaaatacataaaagagcatttcctgatagatattactccatatgatattattgtaggatatcgtgcagatgattcatacttttcgtttgcccaggattttgtttcgggagtaatttcgttggaaaaattatctgaggcgatgcggttaggtaaattgggcgagcagattgtattaaaaagtccgaaagcttttgagacgatttattttcagaattatgaaaatgtagatgcggaaatatattatatcaagaaagcggagcgcgagcgtgaagcaagacgagaatatagaagacgtaaaaaagaaagtgcagatattcatgagttattcatgctggacatcatgagggagggtatggaaaatggtgatacacgcttattcagatgattatcttacgtcagcccaacgaatattgggagatatgttggatttcgcagtgaacacatatgatatggatattgataaattttttgaaatgtttctggtttcaaatgtgtcacggcaatttgaaattggaaatcctacttatgtagccggaaaaacagggtgtgagttagtcaaagaagtgattcgggattctgggttagtaatggaagagtacccagatgagatgtatttggataaatcaccagaatattggagtggctgggcattggcctattatcagtggtatcgaggaagaacattttcacgcatctacagggcggtatcaatgacggaaattcgaaatatgtatgaagtataccacgagatggatttggcacatttcgtggagcggttggatgaattatggaaccaacattatccggagacaaatctgaaacgaattcgtgatttggcgggactatcacagcgagaactggcagaactgtcaggagtatctgtgcggcagatacaactctttgagcaaagacagagagatatcaatcagaccagagcaattgatgtgttgcgattgagcagggcacttggatgcaagaatgaagatttgttggaactatgaggatcaggctaaagcaaagaatcgtctaaagacagcgagatatgggaaagacctgtatctcgctgttaaaatagatgctcctgagttggtgttttaggaaattgtcttaaggactctttttagaattgaagtcagaacaggggcagttattgcagtaaaaatcattccaggagctgcgcttactactaaaggttgccaggcaacacccaagattgttgccaataccagtctggctgcaaacgttccggcaggaccagcaataatgagggccagtgggtccttttttaatactgttaagataagaccggctacaatacggtacaccattgcgataatgacattgtatatagtctgaagacctaatatcatcccaataatgctggcaatgatgccgatggtaagataatgtagaaatcctctgattcttccgatgcttatggctaatggggctgataattgaaattcagttcctggaatgggtgatgggattttaaataagcccgagatgaacagcagaacaacccacatgccgtccatagtcagatttttgacgctaaaaaaatgattggataaaattctttcttttgattcttctgtagtattcatagttttcccatccttttgtttaaaatatttctgccatttcccattgagagagattaaaagcaaagctattgtatacaataagcaactaattgtcaaccattaaataaaaaaggttgacaattagttgcgagtaagtatatactttgcctaaagtatgcaagaaaaaaggagaatgcaatgggaaaagggatatttgtaaccggtacaggtacggatgttggtaaaacatacgttacaggattgattataaaaaagataaaagagaacgggatgactccaggctattttaaagctgctatgagtggaaatgaaagagaggaagatggaacgctgattcctggtgacgctttgtgggttaagaatgtatcaggaatctcccagtcagtagaggaaatgtgcccgtatatctatgagcatgcttattctccgcatctggcttcacgtctggaaggaaatcatgttgagatggcagttgttttggataattatagaaaagtaaaagagaaatacgactatataacagttgagggaagtggcggtattttatgtccgatctgttttgatgaggcacgtattgggttgacagatataatagatgagatggaacttgactgcattctggttgcagatgcaggacttggaacaatcaatagtgttgtactaacttatgaatatatgaaaaacagaaatatgaatataaaaggaatgatttttaatcattatatagcggataatatcatgcatgaagataatatacgcatgtgcgaatatatgacggggcttccgactctggcgaaagtttccatgggagacgtggacttgaatattgatatagcagaattaatttcattatacagataacaatataacggaatgaggaaagcaaaaataagaataattttaggagataaacttatgatctggtatccatatgtacagatgaagaaaatgaagacaccatataaaattgtagatgcagaaggagtttatttgtatacgcaggataataaaatgatagattccgtatcttcctggtggtgtatgatacatggctataaaaataaagaaattaacgaagcaatgaagaatcagattgatcaattcagtcatgtcatgctgggtgggcttactcatgaaccagtcttgaaattatcagaaaaactaaaagattttctcccgggagatcttgattactgttttttttcagattcgggttcggttgctgtagaggttgccttgaaaatggcattgcaatttaatattaatcgtggcagcggaagaaaaaaactcctttcgcttaccggctcgtatcatggagatacatttatgtgtatgaaggccggagatgatgaggattatcattttatattatcagaagatgataagaaggatgtaattcacattccaacggaaatggatgcattggaaaaagtatttcggacacacggaaatgaattttatgcatttattgtagagccacttcttcagggagccggcgggatgaaaatgtatagtattgatttcctgagaagggcaagagaactttgcaatgaatatgatgttgtttttatatttgatgaagttgcaactggtttcggacgtactggaaatcgttttgtgtctgatcttgtacttccggatattatcgtgcttggaaaagcattgactgccgggtatataggacatgcagtgacagtagcaaatcataaaatatataatggattctattctgataaggatacagatgcacttatgcatggtcctacatttatgggaaatccggtcgcatgcagtgcagcattaaaatctatagaaatatttgagcgtgaaaactatatggaaaaaatcaagcatatagaggatatggttagaaatctggtctccggattcactcatccgcttatcaaagaaatcagatatatgggaggttgtctttgtttccaggtacatgacccatcatgtcttatcggatttcaggagtatgcatatcaacgaggagtattttcaagaccatttctcgatattatgtatgccatgtttccgtatatcatacaggataatgagatcaggcagattgttgatgtcatgaaagactggttcactgaacagaaaggaatttaatctatgagtgcggaggaattgtacagtattaagatgcgtgcaagcaaaaaggaaaacggtacggatgtacacatatccggagcagagaaaatcgttgaggcaccggatgttgatatatttgccaatgcgctgatagagagaggaatgcatcattccaagggtgaagcagatgcgttgaacttgaagataaataaagtctgcaaggagaacattatttatcttgatgcactttcagtagagacaattgaggtcgaaatatgggaaaaagggcaggaagagataaaaaaatatttaaaagaaactggaatagacaatccgcaagatgtcatgcaattcttagatgaaacttatgccatgagaggagctatgcttcttgatgttgacaggctcattcgtttagaaccggataaaaaacgtgggattcgtgctaccaatatggatcaggagagaatgaaaggggacagaatcggaaacgagaagaatcattatgaagaagcaattgtacttgcgacaaaagtggcaaattgtcctggtattattggtgagatatgtatttcagatgatcccgagtacgtgaccggttatgtgagctcaaaagaaatcggttatagaagaatcacgaagatgaagagaatggggagcgaaaaaggaggaagaatatttctgtttcgaggaacagatgcagaagaacaaaaagcaattgattttcttcagaatcagcatgtgatcgtcagaaatatacccaaaaagatttgcaaaaaatcagatatgaaaagaccacagaagtgggataaaattgataaagcactggtatctttaaaagaaaaccatctttttcgcacaatgaagacaatagaatcagcacagagttcacatgtaactatagatggaaaagattatgtattaatggcatccaataactacctggatattgccagtcatccttccataaaatcagcagtcgtagaatcgacagctatgtatggatttggctccggtggctccagacttacaaccggaaatacagtgatacataatgcactggagaataagattgcttcctacaaggaaacagaagcagcgatcgtgtttaacacaggatatgttgcaaatgtagcaacaatatccgcaatggtgaaaaaaggagatactgtttttagtgatgaattaaatcatgcaagtattattgatggatgccgtctttcaaaagccaaaattgtaacatatgctcataatgatatggatgatctgcgaaaaaaaatacaggagaatccatgtgagacaggcattgttgtcagtgatgcagttttttctatggatggagatatattaaagcttccggaatttcttgatatctgtgaagagaatcaattgttttccatggtagatgaagcacattccacaggagtgatcggcaaaaccggtcatggaatccgagaatactggcaggaaaaaagacaggtagatattttaatgggaacatttagtaagtcgataggtggcgaaggtggttatgtggccggagagacaagactgataaactatctgagaaatgtggcaagaggattcatattttctacttcactttcgccagtaaccatggctgcgaatctggctggaatcgaagttcttgaaaaggaaatctcaagagtaacaaaattgcagtacaatgtaaaatatttttgtacacaacttgggaaatatggtatcaatgtaaaatctgaaactgccataattcctgttattattggtgatgaggaaaatgcactgacagtttccaactatcttcatgagaatggatattttatatcagcgatacgttatccaactgtcgctaaaggagcagcaaggcttagagtcgcgcttatgtccagccatacagaagcagaactgaaaaagtgtgcagaattaataggaaaagccttattgatgaagtaaaaatatgttaacactttaggagtgaataatcatccaaagacagcgagatatggaaaagacctgtatctcgctgtctttttattaagaaattcttagttttcatctgcaacagtttttctatttgtagactctagtgtatataacctataataaagataatgtgaaactattcatagacttcatgaaccaatacaggtgattcataaaaatggttataagaatcttcaaatgaaaaagatgattcgagaggagggaacgaatgaaggataaagaaaattcaagggaaatacaattcaaagaggaattggttcgcaaggcgaagaatggagatacgaaagcattttccctgttatatgccggcgtttgcaaggaaatgtataaattcgcattatatatgatgaagcatacagaagatgcagaagacgcggtaagtgagaccgttatatctgcatttgaaaatattgcgaagctcaagaatgagagtagttttaaaagctggatttttacaattttaggaaatcaatgcagaaaaatgttgggaaagcgtggaaatcatgcatcagaggaagagacattagaggctggacatgaaccggactatgagcagcattttgatgtgaaggaagcatttgcaaggcttgaggaagaagagcgtatgatactttcgtattctgtgttcgctggatatggaagtgaggaaattgcgcagatgcttgagatgaatgctgcaacggttcgatcaaagaaaagcagggcacttgggaagatgcgtaagatgttggaagcaggatgatcgtacaggatgatcttataagagatgggtttgaaaaaagaatagaagaaggaggcggaaaagatggaagaaaatagagaaaagaacaacaagaagattgaggatgaaaagcgtttagagcaggatttgagacagatggcagatgatgtgattcttccggactcactggaaccggaggcaattcagaaaatgcttcaggcaagacaggaagaaaagcagcagggatcaaaaacgaaaaagaacaaaaagaactggaaacgtatcgttccgatcgcagcagcggcatgtgtctgtgtgatagttggagcgacagttggaatcaagcagatcaacaaaggaaacaacaaaacattagatgcagcgactatcgcatcagcagcagatcagacagagacaacccagacacttacaacagcgaaagattataaagaaattgaaaaatgtatcaaagaatataataagcagatggcacgtgataacaacagtatggccattggactgtatgaaagtgcgtcttcggcagacgcagcaacagcagaaagcagtaatgttagtgacacggggggttattcggatacgaatgtccgtgagaacggcgtgggggaagccgatattgtcaaaaccgatggaaaaaacatttatacactgtgtcggagtgttgtgacaatcacagctattgataatgggtccatggaaaagctggcctcgatcgaacaggatgcagaacgctatgtagaagacatttatgtacaggatgataaattagttctgttcggtacgttaggaagacaggtgggaaattcagaggattcagaagcttatgatggatattatgagaacaatacgtatgtccaggtatatgatatcagtgacccgtcaaatccgaaagagatcggtaacatggaacagagcggaggatataatacatccaggattgtggatggatatgtctatgtgcttagtcagttccatccttatgaaaacaatgttacagcaagagatctgtggtatattccggaagtgcagggaaaatctatcgaagcagaaaatatttatatgccacaggaagcagaaggaaatgaatatacgatcattacagcattttcattagatgatccgtcagaaaaaacagacagtaaggcagtctttggttattcagatgtgtgctatgtaagcgaaaataatatttatattacaagtaattattatgaagattcagatgtgagcagaacgctgattcgcaagatttcttatacagacggaaagcttgctggtgttgcgcagacgaagatcaagggaatgctgaacgattctttcagcattgacgagtatgaaggaaaccttagattagttacaacaattgatgaaatttattcgaatgatgatattatgccattgaatgagactgcagatgagacggatgataagaacggaacaacggataaatcagatgcaagtaaggtgactgagaaggctgtggcagaaaatgtaaaggatgcggtacctggtacaaattcactttatgtactgaatgacaaactggagatcattggctccattcacaatctggcaaaagatgaaacaatctattccgcaagatttatgggagatacaggatatttcgttacttaccgtcaggtggatccattgttctcggtagacctttcagacccaaagaatccgaagattcttggagagcttaagattcctggattttccgaatatctgcatccatatggagacggaaaactgcttggcatagggatggatgtaagtgaagatggatttacaacagaaggtgtgaaacttttgatgtttaatgttacagatccatccaatgtaacagaggaaaataagtatacgattgaagaaagctatggcactgatgtaggatacaattataaaggcgtatttgtagatgttcagaagaatctgttcgggtttgttacctatcatgatggagtaacttatcaattgtttacgtatgatgaggcagaaggattcaaagaagtgatgagcagacagctgagcggatatgaaggcagcagaggactgtatattggtgacgtattctatcttgtaagcggaaatatgatagaatcttattccatgaatggattcgaaaagatggatgatattgttctgtagacaatttgtaactgttcagagctaacctccaaaatactacgcattttatacctttttttgaaattttgcttggctctgaacagttacaatattttggattgacagtttgtaagacgaaaattatactaataggagatgaaatttgtttgaaattgtagttttgtaataagagaaaaggggttagaaatcatgagttccagaaataaaggaatttgctttattatattgtcggcattttcatttgcgttaatgggtgcctgtgtcaggcttgcgggagatgtgccgtccatacagaaaagctttttccgaaatctggttgcattctttgttgcatttataatgattgtgcgaagtggtgacggatttgaaatcaagaagggaaacttaggttatatggttttgcgtgcaacatttggcacgatgggaattctttgtaatttttatgcagtagatcatctggtgctttcggatgcatctatgctgaacaaaatgtctccgttttttgttattttattttcgtttcttctgttgaaagagaaattaaaaccggcgcaggcaattgcaatttttgttgcatttatcggaagcctgtttatcattaagccaacctttacaaatatggaactctttccgtcagtgatcggtctatgtggaggaatcggtgccggtattgcgtatgcaatggtaaggattcttggtcagagaggtcagaaaggaagctctgttgttctgtttttctcagggttttcctgcatcgtgacacttccgtatctgctgcttaactatcatccgatgacaggaacgcagatgctggcactgcttggtgccgggcttgcggcagcaggaggacaatttggaattactgcagcatattatcatgcgcctgcgaaagagatatcgatctatgattattcacagattattttctctacgattctcggatactttcttttcggacaggttccggacaagtacagtgtgctgggatatgtgattattctcgcaatggcggcatggatgttcttctataataaaagaccggaagaaaaagaatagaaactgtttgaagccaaatatatttcagatgaaaaggattataaaatcatggattttgcaagacttgagaaaaatattatagatgtaataaaggaagaacaggcgaagctgggctaccgtaaggagaagattcgtctgtattatccgctgagttctctgaatcatttctttcagttagatgtggatgagacaggaatgcaggaaaaattgagccggttttctgagtatgaagaagggaagcttggaagtgttgaagtgacaaataagggggagcggttctgttttcatattccggaggaaggtgcagaatatgtacacaataatatgaaagagaatgaattcatcaaagacctgatcgggttgatctctcatcatggctgcaagatggaagatatcattgaactgttccgtcagcattcggatcagattacgatcgaagagatgcacagtgatgaatttgattatatgatctgctttgaaaatgatccggaggatacttaccggtattgctttaaagatgaaggatgccatatcatttaccatagattcctgccggaagattatgaagaatttggatttggaaaataactgtcaggtcagacaaaaaggagaaaaaagtgaagcttacaatacttggaacaggaaatgcaaccgttacggagtgctataacacatgctttgtgatcagtgatgacgaccgtcattttatggtagacggtggtggcggaaatacgattcttcatcagttaaaagcagcaggacttaactggatggatatgagagatatttttgtgacacacaagcatatcgaccatcttcttggaattatctggatgatgcgtatgattcttcagaatatgaatagaggaaaatacgaaggagaagctacaatttacggacatgaagaagtaatccgtattctgaaagagatggcaggtgaagttctttcggcgaaggagatgaaatatatagatgatcgtcttcacatggtcgtagtagaagatggagaagaacgtgagatcattggaaagaaaataacatttttcgatattcattctacaaaggcaaaacagtttggattttgtatgcggttagatgaggatgagaaactgacttgctgtggagatgagccgtacaatgaattagagcagaagtatgctgagaacagtacatggctcttgcatgaggcattctgtctctacggacaggcggatgaattcaagccatatgagaagcatcactccacagtaaaagatgcatgtgagatggcagcagacctgaatgtggagaatctgattctgtatcatacagaagataagaatattgaacacagacaggagttgtatctggaagaaggcaaagcttattatgacggaaatctgtttgtgccggatgatctggatgtgatagaactataagaaatttaatcccacagtaagtttgttatatgctatactttgtttatgatcaggttgaattgataaattcagggagaggtgaaggagaatgcttgagttagtaacaggaggcagcggaagcggaaaatcagcttatgcggaaagccggatctgtgaatggaacaggcaggatccgaagcctctcttttatattgcaaccatgtatccttatggagaagagacagaaaagaagattgaaagacaccgtattcttcgtaaaggaaaagggtttgagacattagagtggtatacaggacttaagctacatttggaagagggatcattacaaggctcagatgtgcttctcgaatgtatgtcgaatctcgtggcaaatgaaatgtatatggaattcggtgcaggatgtcatgcagatcaagccattctggaagggatccgagaattgaatcaacagtgttcgaatctggtgattgtgacaaatgaagtgttttccgaatcggttccggattcgccggagatgaaagaatacaaaaggattctaggaaggatcaactgtgaaattgcagcgatggcagatcaggtgacagaagttatttatggaattgcacagcagaaaaagaaaccggatacgctagtcaatagaacagaaaaacctggcgtggacagtaacaaatcaggagagtcggtgatgtgtcagaaagaaaatagagttcatataattataggtggtgcatttcagggaaaaacacaatatgcaacgaaaatttatccgggacttgagctgacagacggattcaattgttcgctggatgaaatcagaaattgtgtggcaatcaataaattcaattcttttacaagacgctggcttttagaaggaaaaacaaaggaagcattactgacgatacttgagaacaatagaagccttcaattattaattagtgacgagataggatacggtcttgtacctatcgatgattttgaaagagaatacagggaatttcacgggcgtgtcatgacggaacttgcagaacaggcggattgtgtggaacgaattgtgtgtgggattccgcagagaataaagtgaaaggaaattagggatgctttcagagatagaacaggtacttccttctgaaatagagaagagaagttttgagattataacagaagaattaaaagagatgggaaagattctctgtccggagacagaactgatcgtgaaacgctgtattcatacaagcgctgattttgagtatgcggacagtcttgtttttacagaaggtgttgtggagaaagcaaaggatgctatccgcagaggtgtgccgattatcacagatacacagatgggaaaagcaggaattaataagaaacgtctggcagagcatggcagtgaagtgctttgttttatgtcggatgaagatgtggcagagatggcgaaaaagaatggcacaacaagagcggtagcaagtatggataaggcagctgcattgggaagagaggctatctttgcagttggaaatgcaccgacagctttagtacggctttatgagttgatcaaagaaggaaagattaatccggaattaatcattgcagttccggtagggtttgtaaatgtcgtgcagtcaaaggaactgatcttaagtctggaagatacaccgtcgatcgtggcacggggaagaaaaggcggaagcaatattgccgcatgtatttgcaatgctttattatatcagatgtaaaacagatgcaaaaaaactttgttagaacttgttagaaagatagaatagtggtattataagactgtttgattagaaaaaagaatagagagggaacaaaacgtgacctataaagaagcaagggtatatttggacgagatgtcgaaatacggaagtgtacttggcttagatacgattcgaggtctgttgcgtgagcttgggaatccacaggatgacttaaagtttatacacattgcaggaacgaatggcaagggatctgtgcttgcatacacttcaacaatattaagtgaggcaggatacagaaccgggcgctatgtctcaccgacagtaatctcttatctggagcggattcagattgacggaacatggattccggaagatgaatttgcagaattgacagagaatgtaaaagaagctattgcccggatggaggcggccggagaggaatctccgacagtctttgaagcagaaacggcaatagcttttctgtattttaagaagaaaaaatgtgatctggtcgtactggagtccggtcttggaggaattctggatgcgacgaacatcatcggagcaccggtgtgtgcagcatttgcaacgatcagtgtggatcatcttggtgtgatcggagattcgttggaagagattgcgcagaacaaggctggaatcattaagcctggatgtgcagtagtatctgcgaagcagaaagagaatgtccgggagattctgaaaaaaactgcagaagaaaaaggctgtcctttcacagaagcacagccggaacagatgatgatttttgaagattcctaccacggaattacattttcttataaagaatatgaaaagatgcatagtccgcttgcaggcgagtgccagagagagaatcttgcaacaacgctcgaagttatccgctgtctgaacagactggggtatcgaattacagaagcgcaggtgcgagaggggctttcaaagacgagatggacaggacggtttacctgcctgtcagagtccccgttatttttcgtagacggagcgcataatgaagacgcagcattaaagctgaaagtgacggtagaacgttatttttcggattataagaaaatctttatcatgggagtctttaaagataaagaatatgagaaaatcacatctattctttgcccgttggcagaaagtatatatactgttagtcttccaaataaggagaggacgcttccggcagaaaagctggcagaagtagtgaagaaacattgtcagaaagtgaaagctgaacagaccatcgaaacagctgttgaggatgcaagtaaagaggcaatgacccaaggcaaggatattgcgcagaaaactgtgattcttgcatgcggatccctgtcttatcttggagaggttcagcggatcgtgttgaataaccggcagtgagatataggagagaaatataaaatgatagatcatgaaaaagtagaacaggcagtccgtcttttgttggaaggaatcggtgaagatgtgaaccgcgaaggtcttatagatacacctgacaggatcgccagaatgtatgaagagatatatggtggaatggaagaagatgcgggagttcatcttatgaagacatttacggtagaaagcagtgagatggtgatagagaaagatattacattctattcaacctgtgagcatcatttactgcctttttatggaaaagcccatattgcctatattccggatggtaaggtggtaggactgagtaagctggcgcgcacggtagaagtatttgcaagaagacttcagctccaggagcagctgacaggacagattgcagacgcattgatggagtatatgcagccaaagggagctctcgttatggtggaagcagagcatatgtgtatgacaatgcgcggaatcaagaaaccgggaagccagacagttacattggcacggagaggtgtgtttgagacagacccgacattagaagaaagattcttccgtatgcttggaagataaagaatacgtaaaggaaaagaagtgaacagacttgaaacaggaaaatatgtatcggttaaatgaagtggtccatcactggatctatcaggattattatggaagaatcaagcggttagagaaggagcgtatcttttgctgtcatcagatgccacattttctggatgtagcaaggatcgcatatattaaaaatctggaagagaaccttgggtttgagaaagatgtgatctatacggcagcagtacttcatgacattggaaaatcatttcaatataaatggacaattccacatgaagtagcaggtgaaaagattgcaaaagagattttaacaacattacctgaagatgcacagtttacagaagaggaacagcagcagattcttcgggctatccgtggtcatcgcagaaaacatgagggaatggaaccgattgaagaattgttttatgacagtgacaaacgctcgcgtatgtgtcattcctgcccggcacagaaacagtgtaactggacggaagaagagaagaatatggagatagagatatgagaattggcggaaaagaatttgacctgaagaaaaatacctatatcatgggaattctgaatgtaacaccggattccttttctgacggaggaagatacgacggattggatcgtgcaatcgaatatgcgaagcagatgattcaggaaggtgtggacatcattgatgtcggtggagaatcaactcgtccgggacatgtacagattacagaagaggaagaaattgcgcgtgttgttccggtaatccgaaaactcaaagaagaatttgatattccggtatcgattgatacttataaaagtgcagttgcagcagcggcaattgaagcaggtgcggatcttgtgaatgatatctggggattaaaatacgattctaagatggcaggattgatagcaaaaacaggagtagcgtgttgtctgatgcataatcgtgagaatacagattatcagaatttccttgcagactttatggatgacatgaaagaatgtgtgaagattgcgaaggacgcggggattgcagatgataggatcattcttgatccaggcgttggatttggcaagacatacgagatgaatctcgaaattattgataaacttgaaatcatgaaagaacttggatatccggtacttcttggaacttcaagaaaatcagtgatcggtctgacactggatcttccggtagaagaacgtgaagagggaacgatggttacaacagtttacggagtgcagaagggttgtgcatttgtccgtgttcatgatgtggagaagaataagagagtaatccgtatgacaagagcattaatgagagaacatgaggtatagaggacagatgcagaagaagtgcgatgaaatcagaattgaagatctggaagtgtttgcaaatcatggtgtgtttccggaggaaaatacgttaggacagaagtttgttgtctcagcagtgctttttacagataccaggatggcgggaaaaacagatgatctgacagcgtccatccactacggagaagttagtgcatttattactgagtttttacagaaaaatacctatcagttattagaacgtgcagcggaagaactggctgaagcgttgcttcttgagtgggacagaatagaaaaaatatctatagagatcaagaaaccatgggcgcctgtaagacttccgttaaaaacagtcagcgtgaagatagagcgtggctggcacacagcatacattgcgttaggatctaacattggggacagtaagatgtatctggataatgcagtaaaggcattgaatgaacttccgacaagtaaagttgaggtcgtatctgaatatcttgtgacacctccctacggagtgacagatcagccggatttcctgaacggctgtctgaaacttcgcacgctgctttatccatatgagcttttagctgaattgaacagaattgagaaagaagcaggaagagagcgaatcattcactggggtccgagaacattagatctggatattattttttacgacgatcttgttcttgaagaggcggatctgtgtattccgcatgtagagatgcacaagagaaaattcgtgctggaaccgttgggagagatcgctccgtataagcgccatccgataagtgggaagcgcgtttgtgagatgcttgttgaattgaatgaaaaagagaattaattgaattattaaaaaggcttattaccagttatgataaaaggtgataagccttttgaatgtaaagtgtgaagaaatatgttacaataacatcggttatgaaaaggaaccagagggaaaggagagggcaaaatgttagaaaaaatatttaagctttctgaaaacaaaacagatgtaaaaacagaggttcttgccggaattacaacatttatgacaatggcgtatatcctggcagtgaatccaagtatcctgtcagcggcaggaatggattcaggtgcagtatttactgcaacagcattggctgcattcgtcggaacattgctgatggcagtacttgcaaactatccgtttgcattagcacctggaatggggttgaatgcatattttgcgtacacagttgtaatcggtatgggatatagctgggaatatgcattgactgcagtatttgcagaaggtattatctttatccttctgtctgtaacaaatgtacgtgaggcaatctttaatgcgattccgaagaatctgaaatccgcagttagtgtaggaattggattatttatcgcatttgtaggtctccagaatgcgcatatcgttatgggcggcgcaacattggttgaactgttctcagtggatggttataataaactcaatggtgtaaatgcaacaatgaacgatgttggaatcacagttctacttgctattattggtattctgattacaggatggcttgtagttaagaatgtaaagggaaatatcctttggggaatcctaatcacatgggcaatcggtattgtatgccagtttgccggaatttatgttccgaatgcagaagttggatgcttcagcctgcttccggatttcagtcacggattatctattccaagtattgcaccgattttctgtaaacttcagtttaagggaatctttactttggactttgttgtaattctttgtgcgttcttatttgtcgatctgtttgatacgatcggaacacttgtaggagtttcttcaaaggcaggaatgcttgacaaagagggaaaacttccaaagatcaaaggagcgcttcttgcagatgcacttgcaacaacagcgggagctgttcttggaacatcaacaactacaacattcgtagagagtgcttcaggagtatctgagggaggaagaacaggtcttacagcagtgacaacagcaatcctgtttggtcttgcattgttcctgtcaccgattttccttgcaatcccatcatttgccacagcaccggcattgatcattgtaggactttacatgatgacgaatattacaaacattgatttcgatgatctgtcagaagcaattccttgttatgtatgtatcattgcaatgccattcttctatagtatttcagaaggaatctcaatgggaatcatcacatatgtggttctgaatctgttaacaggaaaagcaaaagagaagaaactaagtcttctgatgtatattttagcaattctgtttgttttgaaatatgcattcctgtaaatgggattgaatgacgtcagaaagatatcaaaataaaaatagaaaaaatcaagagctggacagaagtatattgaaaacttctgttcagctctttgtggttgaaaaatgtctgagcaactcttttagagcagctgctcaaaggtgtcataaaatgttgggtaagacacatctacgcatttactgtcaagaatctttgtagtaccttctgcaacaagtgcagcaatactgaatgccattgcaattctgtggtctaacaaagtatgaatagaagcaccatgaagaggtcttccgccattgatgatcattccgtcttcagtaggtgttacatcacagcccattgctttcagattatctgttacagtctcaatacgatcagtttctttgactttcagttcggcagcatctttgattatagtagtaccttctgccatggctgccataactgcaataaccggaatctcatcgatcaaagttgggatgatgtctccttcgattgtagttccatgcagtctacttgtgcggacaagaacatctgcaattctttccccaccttctgtacgttcgttaaggagggtgatatcaccacccatatcttcacatactctcaagattcctgcacgtgtcgggttgattcctacattttctacaagaatttcagaatcagggacgatcagtccggcagcaatgaaataagcagcggaagagatgtctcccggaactgtgatttcctgtccgtaaagttcttcacaaggacggatgatagcggttgctttggaagaaccaatctcaaaagtagagcggatatctgcaccgaattctttcagcattaattctgtatggtttctggaaagactcggttctgtgacagcggtctcaccatctgcgtaaagaccggcgagcagcaggcaggatttcacctgcgcactggcaaccggtgaatcataatggattccatgaagctgcgccggggtaatataaagcggggcacatccattgcggagaatactggaaatatgtgcgcccatctgtgtcaatggttcaatgattcttttcattgggcgggagttcagtgattcatctccggacaatttagagtcaaacggctgtccggcgagaataccggaaatcagtctcgttgttgttccgctgtttcccacatcaaggatcttctccggagcactcagtccatgcaatccctttccgtgtacgataacggaagaataatcgctctcaacttcaatctcaataccaagctctctgaaacaacggatagtcgcgagacagtcggcaccagagagaaagttgtggatctgcgtcgttccgtttgcaatcgagccgaacataatgcagcggtgggagatggatttgtctcccggtattgtaacttttccttttaatcctgtaatattacataattccataatcttattcctcatttctgctatcagacttcatagatgacatagcggtatttctgcaaaagtacagaagctctgtttgcagaatcttcatcataaaattcaatacgaagaactccttcctcaaattcacggttgtggatgattccgatgtttttgatactgatattattacttgcaagaattgtggcaatcgtagcaattccacctgtttcatcgatgatatcacaataaagtgcaaactgctttttgatcggtcctgcagatccgttcggcatggagtttctgtaatctttggaattctcaaacagagcgtacagggcaggttcatttccttcatccacaagatcctttgcatgtgaaagagcttcaatatattcacctaagatctgggagatgttctcactgtttttcagacagatctgctgccacatgaccggggaggaagaagcaattctcgtaatatctttaaatccccctgcggccaacgctttcatcatcccttccttcgaatccgtatcatgtacaaaattcacaagtgtggatgcaataatatgcggcaggtggctgatcgttccggtaatatgatcgtgctcgtggtaatccaggataacaggaagagcttttaaagatgaaacaaagtctttgtaagcatccactttttcttccgctactttagcagaaggagtcaggatatagtatgcattttcaatcaaatgagctttggaattcataaatccgctcttctcagaaccggccatcggatgtccgccaatgaaattcgcttccattcccagacgaatcacctcttcgtggatggaagtcttaacgcttccgacatctgtgagaatacagttttcatccaggagatctttcagctgggaaagataggcagcattgtaagtgaccggtgcacagaggaaaatgtagttacatcccctgaaattgtcatcaatggatgaacaggaagtatgaatagtgccttcctggattgccagtgcaagggattctttatttttatcgaatgcgatgatgtcgtaatccggataatactggcggattgccttcgcaatagagccgccgataagtccaagtccgataaatccaatttttttagcattcatagttgtaaaatcctttctgttgttgtgcaaaacatatcttactgttcagaaatcttaaatcagtaagaaacatatattcgtattttaacactttgctctgtaaaagtaaattggtaatattgcgttactggtcgcacattgtgtgaacagcaacacaatattgcttctaatataagcggagtgttttcaaagagtagctttatgatagaaagttaaaattgtataaaatgtaaaaaatagttgtaattaatcagaatatttagtacaatatacccatggtatgtatatcgacgacaaaaaaacgatgtgcataatagctacataacaaggaggcagcagtatgaaggtttacagaacagacgaaatcagaaatgtggtattacttggtcatggtggaagcggaaagacaagtcttgcagaggcgatgctctacgtatcaggtgcaacgaatcgtatgggaaagatttccgaatccaatacggtgagcgattttgataaagaggagcagaaacgtggattttcaatcagcacaagtctggtaccgatcgagtgggagaaagcgaagatcaatattcttgacacaccgggatattttgattttgtcggagaagtagaagaggcagtcagtgcagcagatgcagcggttatcgtagtatctggtaaggcaggagtacaggttggaacggaaaaagcatgggagctttgtgacaaatataatctgccgagaatgatctatgtgacagagatggatgtggatgatgcaagtttccgtcaggtagtagcagatctgacagagagatatggaaagaaaatcgcaccacatttccagccgatccgtgagaacgagaagcttgtaggatatattaatattattaagaatgccggaagaagatatacaggcattggacagagagaagagtgcgagatcccggattactgtatgccgaaccttgagattttgagagattctcttatggaggctgtagcagagacaagtgaagagtttatggagcgctattttaatggtgaggaattctctatagaagagatccgtgcagccatgagaacagaagtaatggatggggatatcgtaccggttgcgatgggatccaatatccaggcacagggagtagccaacctgctttcagatattgttcgtttcttcccgagtccggataagagaacctgtgcaggaatcaaccgcagaacaaacgagatttttgaagcaaattatgatttcgcaaaagcaaaatcagcgtatgtatttaagacaatggtagatccatttattggaaaatactctttcgtaaaggtatgctccggagtacttaaaggagatgatgtactttataatgcagacacagacgcagaagagaaaccaggtaaactttataccatgtgcggaagtaagccaagcgaagtgacagagcttttcgcaggtgatatcggagcaatcggtaaactgacaaatacaagaacaggagatactctttctgtaaagggaacaccggtatcttatgcaaagacagattattctgtaccatatacatatatgaagtatcgcgtaaagaataaaggcgatgaagataaggtatcacaggctcttgcaagaatgacagcagaagatgttacattgaaagctgtgaatgacagtgagaacagacagtctcttctttatggaatgggtgagcaacaccttgagatcgtagcaagtaaactggcggcaagatataaagtagagatcacactggagacaccaaaagttgcattccgtgagacaatccgtaagaattctgacgttgattccaagtataagaaacagagtggcggacatggacagtacggacatgttaagatgaaattcgaaccatcaggagatctcgaaactccatttgtattcgaagaatgtgttgttggaggagcagttccgaagaactatttcccggcggtagagaaaggtctgcaggaatctgtagtgaaaggacctcttgccggatatccggtagttggtgtgaaagctactttatacgacggatcctatcatccggtagactcttcagagatggcatttaagacagctacgatccaggcattcaagaaaggattcatggaggcatctccggtacttcttgaaccaatcgcatccctgaaagttacagttccggatgattacacaggagatatcatgggagacctgaacaaacgcagaggacgtgtgcttggcatgacaccggtagccggaggaaagcaggctattgaagcagatattccaatgacaggactgtttggctattgcacaacacttcgctccatgacaggtggaagaggatcttacgaatatacatttgcaagatatgagcaggctccatctgatgtacaggagaaagaaattgctgcaagagcagaagaagcataattaaagattcaggcaatacaaagagtgtgttatccggctgataaaaaggagtggatagcacgctcttattgcttgttttagaaaaaacagtaacattgtatttcacaaaaaaatcacaagtttgagaatatggttgtactttcaaaacaaaggtgctataattcatctacctgtctgcattagacaggtatgttgttgtttatgaaatcctgtgaacagtgacataaagtgactgtgtagagcagttataagattattataataatatgagggataagaaaatgaggattattattatcggtgacggaaaggttggttacaagcttgccaagcaactttccgccgagaaatatgacattataatgattgacagtaatgaaaataagttgagatttgctatggatcgtctggatattgcctgcgtgacgggagatggcgcagacgcagaagtacttaaacaggcagatgtagcgcatgccgatttggtgattgcttgtacatcagcagatgaatgcaatatgttaagctgtctgatcgccagaaaattaggtgcaagacatacgattgcccgtgtgcgtaatccgatttattatcgtcagattggacttctgaaagaagatctgcatcttagcatggctgtaaacccggaacttatcgtggcagatgagattagcagacttctgctcttcccggatgcgagtcaggtggagacttttgtgaagggacgtgtagaattgattgaattaccgcttgcggagggaagtagcctggcagggttaagccttgcggaaatgtataaccggttccagatccgtctgcttgtctgtgcagtggaacatggagatgaagtttgcattccagatggagaatacaggatgcgtgcaggagaccgtctgcatattgcggcatctcataaagatttagaggcattttttaaagcaaatggaaagcgtaaggacaaaatcaaaaaagtcattatttgtggagccggaagagttggttactatcttgcacttcagcttagcacacttggtatgcagataaagattatagaacagaatcgccagagatgtgaagaactttgcgaattacttccaaaagcaaccattattaatggagatgcaacagatcacgatcttcttgtagaagaagggattgatgaagcggatgcatttgttgccctgacagggatggatgaagagaacattatactttctctttttgcaaagagtcagaatgtggacaaaattgttacgaaagtcaatgaagacagacgcgcacgtatggtagaagactttggaattgacagtattgtttctgttaaaacagctacagcagacgcaatcatgagttatgtcagagcgcgtaaaaactctcagggaagtgcgaatgttgagacaatgtatcaattggttgatgacaaagttgaagcactggaatttattgttaaggctaagacaaattatacaggaattccattgaagaatctctcgttgaaaccgaataatctgattgcatgtattgcaagaaaacgtcagatcattcttccgagcggagatgattgtattcaggtaggagataatgtgatcattatcacgatggaaaaacagattgaagatattaaagatattttaatgtaggtgcagcgcgatgaataagaagatgatagtatatattttggggaaaatgatgggagtcgagggattacttcttctgatcccagcgttggtttccctgatatatcatgaaaaaagcgtaatttcttttctgattgtagcagcaatcctgctcgtaatttatatggtgttcggaaggaagcttccggcttcaaagcagatttacggaaaagaaggttttgttattgttgggcttgcatggattttatggtccgcattcggagcgcttccgtttgtgatttcgggaagtattccatattatattgatgcactttttgagacgatttccggtttcactacaaccggatctacaatcctggcagatatcgaggctctgccaatgggaatttccttctggcgaagctttacacactggatcggtggtatgggggtacttgtatttgttatgatgatcacatctctggatgatgagaatgcaatgccgctcatgcgtgcggaagtaccgggaccggaggcggataagcttgtcccaaaggcaagacataccgcaagacttttatatggaatgtattttgttctgacagcagcagaagtggtttttctgctttttggcggaatgaacttgtatgatgcacttttacatgcattcagtactgccggaacgggaggattttctaatagagctgcaagcgtcagcttctacgacagtgcatatattgatggtgtgatcacagtatttatgattttgtttggaattaactttaacttgtactttttcatattgctcaaagactggaaatccattctgaaaaatgaagagctgtgggcatatcttggaatagtaggtgtgtcaattgctataatcacaggaaatatcctcaagatttatggaacggttgcacatgcattccgctatgcatctttccaggtcggttcgatcattacgacaaccggatttgcaaccgcagattatgaccagtggccggaactctcgaaatcaatattattggcacttatgtttgtgggagcctgtgcaggatccaccggaggaggtattaaagtaagccgtttattgatcatcgtgaaatcaatccgcagagaagtgcgtaagatgttacatccaaatgcagttacgatcattaaagtcaatggtaaaaagattggacaggatacaatgaagaatgtaaatctctatctgacgtgttacattataattatgattgtatcaattttacttgtctctattgataattttgattttgcgacaacatttagtggagtacttactacgatgagcaatgtaggacctggaatttcaaaggtaggacctgtgatgaatttccacccattttcagcagtatccaagctggtattctgctttgatatgctgattggaagattagagatcttcccatacctgcttcttctttctccggaactctggagaagaagattctagatgattttttgttaattatgtgcggaaaaatttgaatgaaacagattttttcgcacattttatttttatatgataaaatggtaactgttcagagctaagcaaaatttcaaaaaacaggtgtaaaatgcgtagcattttggaggttggctctgaacaattacgtaaaatgaaagaaaggaagaggtgagatgaacaaatttaaaatgaaagtgacagctgtcataggagtgattctgttgattggaatctattactatgtgacactcccggcgatcaatattcatgcctcagaattctggatgtatcttgtggtgttggtcattctggcagctgtggtatttatcagaaagaaaaatttaaaccgttacgactggaaagagtcaaagggattaaaggtgatccttggaatccttgcggtgcttgtgatcgcatatgtggcaggatcagttttgtcttctccaattgtgaatgcgaagaagtatcaggaacttttgatggtgaagaatggagaatttacgaaagatatcgaagaattatcttttgatcagattccattgctggataaggattcagcagagcttctcggtgacaggaagatgggaagtatggtagatatggtatcccagttcgaggtagatgaactgtattcccagatcaactatcaggatcagccagtgagagtttctcctttgaaatatgccagcgtgatcaaatggtttacgaacatgagagaaggaatcccggcctatatcaagattgatatggcaacacagaatacggaactcgtaaaactgagtgaagggatgaagtacacgacaagtgatcattttaacagaaatatttaccgtcatctgagatttaactatccgacctatatttttaatgatttgagttttgaaattgatgaagacggggttccgtactggatctgcccggtgaagaagtacaatatcggattattcggtggaacaacaatcggaagagttgtactttgcaatgcgatcacaggagaaacgaaggattatgcagttgaggatgtcccacagtgggttgacagagtatattccgcagatctgttagttgagctttataattatcacggaacattgaaacatggtttctttaatagtgtattggggcagaaagactgcttgaatacaactgacggatacaattatcttgcaatcgatgacgatgtatgggtatacacaggtgttacctcgattaccggagaccaatcgaatgtagggtttgttctgatgaatcagagaacaatggagacaaagttctatgagattgaaggagcaacagagagttcagcgatgtcttccgcagaagggcaggtacagaatctgcactatacggcaacattcccactgcttttaaatatttccggtgaaccgacctatttcattgcattgaaggatgatgccggtctggtgaagaagtatgcgatggtaaatgtgcagaaatatcagattgttgcaattggagatacggtcagtgaatgcgaggagtcttacactaatctgatgtataagaacgggatcaagacagaagctgaggatacaagatccgtagagacactgacagctaagatcacaaagatcgcccagggcgttatagacggtgattctcattattatatcatgcttgaaggttcggatgagatctttgatgtatctgttgtagattttattgatattatccggtttaatgtcggagatgaagtcacagttgagtataagaagggggagcaggtggatacagttctttccctgaatggaaaagcgagtgaacagatcagcacaaaagctgcgaaagaagagcaggcagaagatacggcaggggattctgcacagacagaataagagaaagaagcgaaaaaaagaagtacaaccggaaaacggaagtacttcttttttgattcctgaaaacatttaattcagacccaaaagggcgaatcctgtgttacactacgttgtaaatacttacagaactgtgcatccaagtgtgtcaacatctgcaatctcagctttatctgcgctgacgctgaggtagaagtcaatcttggcatcttcggaaatcttatttaatttctcgatgaatgtcggaagactttctaatgtgatattagcctgctttaagatactgtcaatgaaaacagcctcgatatcgtgattgccagcagccataccatagaggaaacctacgaattcttctaaggtaaggatgtcaggataatcagccatcttgatgacacggatattaaaatctacagaataagtgtctttgctgctccttttaataaatacgacattaccggaagaagtcttaaccttctcgtttgcaagatcgatcatctgctgtgtttttccgctgcctcttgggcctgtgattaaatttaccatggcgaatctctcctttatgtaagtgtgtataatgtttgagattttctcacctctcaaatatttataaattcattatacactaaagatatgtgagtaacaactaaaaaagtgttaaaatttgaaaaagttttatgcggaattaccataagaaatgagcagtaagatgccaccacggtaatgagaaaagttctcaaaaactgtattgaaaatcattttcatttatgttaacataatacttgaatgaaaactattctcaaaataaagctaaggagaacgatatgccgacggaagtattatcctactatctaaaaaataaagaccggaaggtgaggcttgggtttcaggttatattacagtgtgcgccttttctaaaagggcttaaagtatctggcctgatttcaatggaaaatgaatcatattctgaattggaagaaatgttttccgggatggagatcaatttttataaattatcctgctcagaggggaaatgccttgtccttttctatcgccccaaagagctggaagaatatatgaaccagccaaaactccgcgaactgatcggacaatacggatataaggaaagcaatatcgaggaaatgctggcacatctgtcagaacgtatctgcgagtgtactgcacaaggaattggattcccacatgagattggagcttttctcggatatccgacggcagatgtgcagagctttattgaaaaagaaggcagagattttattatgacaggatactggaaagtatatagtaatcctgaaaaagcgagaatgatttttcatgaatatgaccgtgcaaaggtttgtgcggtgaatgagtatctggatggaaaaaacatccgtgaaattgcattgaatcaaagaaagtggaggaatttataaaatgagtatatcagttgtatattggagtggaaccggtaatacacaggcaatggcagaggcggttgccgaaggaatcaaagcggcaggtcaggaagcagaacttctggaagtaggaaatgcagatgcaaaaacagtggcagaagaagctgcatttgcacttggatgcccggcaatgggggcagaggtacttgaagaatctgagatggaaccatttgtagaagaactggaatcttatgtgtcagggaagaagatccttctgttcggttcttatggatggggagacggagaatggatgagagactgggcagaccgcatgaaaaacgctggggcacagttgatccgtgaagaaggaatcatcgcaaatgaggctccggaggatgacgtacttgaagaacttaaggcagcaggaaaagagctggcagaataatcttattgttaatgtttattaataaatattagtaatcttaattgaaaaaatgtttgaaacgtattgcatttcttataacatagtgctattcttaatttcatcgtgttaaagcacgaaagagaaaacttgctgtcatttacatctgacgtgaatgacagcaatactcaggagagtctctttaaaaagagcgccgaaggtgtaagcggtcatggatgcagttacatgccgcgagtctctcaggcaaaaggatggaggaataaagaaatgtttgcacaaatcgacaaaatcatcactgcaatcgacaatgctgtgtgggggcttccgttgatctgcctcatcatggcaacaggtatctttctaacagccagacttggtcttgtacagatcaggcatcttggcaaagctttcaaattcatgtttaaagatgaagaagacggtagcggagaagtgaccagctttggggcactttgtacggctctgtcagcaacaatcggaaccggtaatatcacaggtgttgcaacagcaatcgcacttggtggtccgggagcattgttctggatggttatcgcggcattctttggaatggcgacaaaatacgcagaaggtcttctggcaatcaaatatcgtacaatcgacgaagacgggcatgtacttggcggaccattctattatattgaaaacggaatgggtaagaagtggacatggcttgcgaagatttttgcattcttcggagccggagttggtctcttcggaatcggtacatttacacaggtaaacagtattgcatcagcggttaagaatttcttcgacccggatatggcacatacagtttccctgtttggaggaaattattcttgggcaactgtagtcgcaggagtaattctgacagtgtgtgtaggtcttgttgttcttggaggaatccagagaattgctaaagtatcagaagttatcgtaccatttatggcagttctttatgtaggacttgcagtaatcatcattattgcaaatatcacagctgttcctgcagcgctggcttctatcgtgaaatctgcatttacaggaagtgcacttgcaggaggagcggttggatccgtgttcgtagcaatgcagaaaggtgttgcaagaggaatcttctcaaacgagtccggacttggtagtgcaccgatcgcagcagcagcagcaagaacaaaagagccggtccgtcagggtcttgtgtctatgacaggaacatttattgatacaattgtaatctgtacaatgacaggactttctatcgtgatcgccggttcctggctgaacccggaacttgaaggtgtggcaatcacaatggatgctttccagaaaggacttccattcccatcgttcgtagcgacattctccctgatgctgtgtcttgtattctttgcattcacaacaattctcggatggaactattacggcgagagatgcgtggaatacctgtttaacagaaataaaggagttgtaatgggatatcgtatcctgtatatccttgcagtattcattggaccttatatgacagtaaaagcagtatggaatatcgcagatatcttcaatgcactgatggcatttccgaacctgatcgcacttcttgcattgaacggagtgatcgtcaaagagacaagagatttccatgcaaaacataacggatcttattagaaaaagaattgaccgaattatctgtgaattcgaaaaataaatagaattattacctgaaataaaacgaaagaaaaggcagccaaagtccttgaataaggactgtttggctgccttttccgcaggtgtgaaaggagaatgagtagacagataattcatagacagttttgattttgtataacagatggagtaaagattatcagttaaatgaaaaactcaaaaaatgtagcagatgttctgaaaatacatgatactgtgttttggggattgcattatactatattttgtattagaataagtatcagacagcacgatagaaacggataaaacacaagatatcgtgcaagaataagaaaaagtgaggagactgatcaatgaaaattatcaagcgaaatgggtcggaagagacatttgatatacagaaaatcgtggttgctgtgacgaaagcggataaggataatggggagcgtacgctgacagacagccagattgaagatatcgcagaatatgtggaattcaagtgtaacaagttgaatcgtgcagtatccgtagaagagatccaggatatggtagagaatcagattatggctaccggagcttttgaacttgcacgtaagtatgtaagatatcgttataagagatcccttgtacgtaaggcgaatacaacagacaatcgtatcctgtcactgatcgagtacaacaacgaggatgtaaagcaggagaactcgaacaagaacccggcagtcaacagcgtacagagagattatatggcaggagaggtcagccgtgacctgacaacaagaatgcttctcccacatgatattgtggaggcagacagagaaggaatcatccacttccatgattctgactattatgcacagcatatgcacaactgtgatcttgtgaatctggaggatatgcttcagaacggaaccgtgatcagcggtacaatgattgaaaagccacacagcttctctacagcatgtaatatcgcaactcagatcattgcccaggttgcaagtaaccagtatggcggacagagtatctcacttgctcatctggcaccgtttgtagatgtttccagagagaagatccgcaaggaagtgatcagcgaacaggaactggtcggaatggaatatccggaagatgtgctcaatgagatcgtagagagaagactgaagaaagagatcacaaagggtgtccagacaatcgaatatcaggtgatcacactgatgacaactaacggacaggcaccgttccttacagttttcatgtatctgaacgaggcaaagaacgagagagagaagaaagacctggcgatgattatcgaagagacacttcgtcagcgttatcagggagttaagaatgaagccggagtatgggtgacaccggcattcccgaaactgatctatgttctggaagaagataatatcgaagaaggaagcgaatattattatctgacagaacttgcagcaaagtgtactgcaaagcgtcttgttccggattacatttccgagaaaaagatgaaagagcttaaagaaggaaattgtttcccggttatgggatgcagaagctgcttaagcccatggaaagacgagaacggaaactacaagttctacggacgtttcaatcagggagttgttacgattaaccttgttgatgttgcactttcttccggtggagatatggataagttctggaaaatctttgatgacagactggaactttgctatcgcgcattgatgtgcagacacaaccgtctgaaaggaacactgtctgacgcagcaccgattctgtggcagttcggagcacttgcccgcctgaagaagggagaaccgattgataaacttctctatggaggatattcaacgatttctcttggatatgcaggactttacgagtgtgtgaaatatatgacaggaaaatcccatacagatccggatgctacaccatttgcactggatgttatgaagcacatgaacgatgcatgtaaccagtggaaagaggagacgaacgttgctttcagtatctatggttcaccgattgaaagtacaacctataagtttgcaaaatgtctgcagaagagatttggcattgttcctggaattacagataagagttatattacaaacagctatcatgtatttgtcagagaagagattgatgcattctcgaaactgaagtttgaatctcagttccaggcactttcttccggtggagcaatcagctatgtagaagttccggacatgaaagacaacattgcagccgtacttcaggtcatccgtttcatttatgacaacattatgtatgcggaactcaatacaaagagtgattactgtcaggaatgtggatatgacggagagattcagatcataacagatgaggaaggaaagctcgtatgggagtgtccgcattgcggaaaccgcaaccaggatacactgaatgttgcaagacgtacctgcggatatatcggaacgcagttctggaatcagggaagaacgcaggagatcaaggagagagttctgcatctgtagaatcacaattgtatttgtaacaggaattgttttcaaaagtaaagtaaaaatggagcttgacgattaatcgtcaggctctttttatattgtctttttgcacttgccaagatagtagagagctgttgctatgtgcaacagctctctttaaagcccaaactcttttaataatttcttctgatattcccggtctgcagctgctttgagaatctcatcagttctgttaagttcggacaactttaaaatcagctgattgatcctgttttctccaagagattccccttctcttatcccttcttctcttttttcatctaattcatctttcattaattctaataatgcattacacatatctcgtttcccctcctttagccgattctcgtttgcttttactataatttccataacagcctgatatagctgatcttctttgttctttttataatcctctaaaagcttccttgtgacagacatgtctttcagtgtatctgttaaactatataaccagagatttttctccggcgataatcgatttgttacaagaatctgaatcggtaagatatctccaattacataataaatcccttcttccggattatcaatagtgtagtggcgtacttctttcaaatgtcggatcagttctcttggatatcgttttgatactaaggtgatcgtcagctcctgaatcggaatttcatttacctttcctgtatctgctttataaaaatttgtatatccatataccttatagaaatcgtccacggaaagggaatcggatggtgatttatattcgatgatattatacttacggaatattttcccaatatttttatggataggttccgcatccttcatttttaatgatcaacacatcaattgccattggctttgaacttaatagatactcccgttcaaattttaatttttctttttcttctctgaattcaatctgcaagtctgcataaaatgctggatgccactgaagcagctttccatctgccggttgctgttcttcacgcaattgctttctcttttgtttcatctaagagacctccttatgtgatttttcacagaagttatcccttcatcagaaaacctctgctttaaataatggattttaaaagcatgaattttctgatttgacaggtgtattctacctgtaatgaaaccttttatatgaatttagatgttttagaaaatatgctttgaaataggataacatatttatgtacaatattcaatgcttttcgataatgaactgttacttctgggcggttacttctaagcagcatcacttaagatagcaaaagatgaaaagatatggtatgataggggtaaatggaaagaaaattccaatcaatgctatgatacgaaatgtattttggaataagtggaaaagaggattcaaagtgaactacggagagattaaaaaatgtgatattgcaaatggagagggtgtccgtgttgcccttttcgtgtcaggctgcaggcatcattgtaagggatgttttaacagtatgacatgggattttaattatggaaagaagtttacggaagaaacagaagaagagattctggaagcgttgaagccgaattatattgatggattgtcattgcttggaggagaaccattcgaaccggagaatcaggaagtgcttgtgaagcttctaagaaaagtgaaggaacgttatccggagaagaacatctggtgttacagcggttatttattcgatgaggaactgaagaaagaaagcagggcaagatgtgagtatacggatgagatgctttcgatgctggacgtacttgtggatggaagattcgaggaagataagaaaaatattacactgctgttcagaggttcggaaaatcagcgtttgatcgatgtgaagaaatcactggaacaagacaaggttgtagaatggaaaccggcaataaaaagaggactttaagcggaaaaaagccttgacttatatccgcatagtttttataatgaataggtatattgtaaaaacgcagatgaggagtagtagaaggaaaagatgcttttcagagagctgtcggcaggtgtgagacagcagcacagactttgaactgacctcggagttctttcggtgaaaagatgttatattgattagccggaggcgggagttcccgttatagaatgaatgagtgcatttgactttgtgtcagatgaataagagtggtaccacggaattaaagccttttcgtctcttggatatatgagaagaagaggcttttctttatattgatgaaagagaggaattaagtacatgggtacaaagattgtttacaatcacaaagccattgagaaaaaatggcgtgagaaatgggaagagacaccggtcaatccaagaaatggaaaagacggaaacaagaaaccgaaatattactgcctggatatgttcccgtatccatcaggaaatggtcttcatgtaggacattggagaggatatgtaatctctgatgtatggagccgttataaattacagcagggatactacatcgttcatccaatgggatgggatgcattcggtcttccggctgagaactatgcgatcaagatgggcgttcacccggcaaaatcaacagaggcgaacatcacgaacatcaagagacagatcaatgatatcgcagcactgtatgactgggatatggaagtgaatacaacagatcctgagttctacaagtggacacagtggatcttcgttaagatgttcaaggaaggtcttgcttacgagaaagagttcccgatcaactggtgcccgtcctgtaagacaggtcttgcgaacgaagaggttgtgaatggtaaatgtgagcgttgtggtgcagatgttacaaagaagaaccttcgtcagtggatgcttcgtattacaaaatatgcagaccgtctgttgaatgaccttgataaacttgactggccggagaaggttaagaagatgcaggctgactggatcggaaaatcttacggtgcagaagttgacttcccggtagaaggaagagatgagaagatcactgtttatacaacaagaccggatacactccacggagctacatttatggtacttgctcctgagcatgagctggcagcatctctcgcaacagatgagacaagagaagcagtagagaaatacatttatgatgcatctatgaagtccaatgttgaccgtatgcaggacaaagagaagacaggagtcttcacaggaagctatgcgatcaacccactgaatggagcaaagacaccgatctggctgtctgattatgtactggctgactacggtacaggagcaatcatgtgtgtacctgcacatgacgaccgtgacttcgagttcgcaacaaaattcaatattccgatcattcaggttatcgcaaaagacggagaagagatcgagaatatgacagaggcatatacagatgcagtcggaacaatgatcaactccggtgagtggaacggtatggagtcttctgtgcttaagaaagaagctccgcatatgatcgaagagatgggaatcggacgcgcaacagtaaattacaagctgcgtgactgggtattctcccgtcagcgttactggggagagccaatcccgatcattcactgtccgaagtgtggaaatgttccggtaccggaagaagaacttccacttcgtctgccagaggtagattcctacgagccaacaggaacaggtgagtcaccacttgctgcaatcgatgagtgggtaaactgcaagtgtccggtttgtggaagtgattccaagagagagactaacacaatgccacagtgggcaggatcctcctggtatttcctgcgttatgtagataaccacaattcagaagcacttgtttccagagaaaaagcagacgagatgcttccggtagatatgtacatcggtggtgtagaacatgctgtacttcaccttctgtactccagattctatacaaaattcctgtgtgatatcggggcaatcgactttgatgagccattccacaaactgttcaatcagggtatgatcacaggtaagaacggaatcaagatgagtaagtccaaaggaaatgttgtatcaccggatgacctcgtacgtgattacggatgtgactccctgagaatgtatgaactctttgtaggaccaccggagctggatgcagagtgggatgaccgtggaattgacggcgtaaaccgtttcctgaaacgtctttggaatatccttatggaaagcaaggagaaggatgttcatcctacaaaagagatgatcaaacttcgtcacagaatggtttatgacatcacaacaagacttgaaagcttcagcctgaatacagttatctccggattcatggagtacaataacaagttcatggaaattgcaaagaaagagggcggaatcgacaaagagacactcgagacaatcgcagtacttctttctccattcgcaccgcactttgcagaagagatgtgggagcagcttggacatgaagagacaatcttcaatgcaggatggccaaaatatgatgagaacgagatgaaagatgatgagatcaagattccggttcagatcaacggtaagacaaaagctgtaatcgagatcccggcagatatctccaaagatgatgcaatcgcagcaggtaaagaggcaatcgctgataagctgacaggaaatgtgatcaaggagatctatgttccgaagaagattatcaatattgtaatgaaataattcaaaataatgagaaatggcgcagatgatagagatattgtctgcgttattttttgttgttggattttatgatttcatagttcttaatataattttgatacgtaaaaatacgttgacgcacgtatttttacgtagtaatatataaatatgataaggaaaggagacacaaaagatgccaatgagctcgaaggagatgctaaaactcctgaaagaaaatggatttgaagtaatcagtcagaatggttcgcatgtaaaaatgaagaatctgaaaactgataagacagtaattgttccttatcactccaaggacttgaaaaaaggattggagcaggcaatacttaaacaggcagggcttagatagtcctgtcgcttgaaagagaggttatttgatgaagaatagattattttatccagctgtttttcataaagcagaagaaggcggtttctgggttagctttcccgattttcctgaatgcatgacacagggcgatagcatggatgaagcatatgaaatggcgatagatgcattaggtttgtcattgtccagtatagaagatgaaggaactgatatcccaaaagcatcagaatttgaaacggtggatcctgaagatgggattctggtaattatagaatttgatatggcagagtatcggagaaagcacagatcaaaggctgtaaaaaagacgctcagtattccagaatggttaaatgaagcggctgttcgagagaatcttaacttctctcagattcttcaagaagctcttatggtgaaattaggggtaaatggaagattgcggtaatatgtctaaaaattgttcctaagtcctctatgtatcatcagatccttggatgttccataagatcaaatgcggagttatgaatcagataatcataagcagctgcaatctcttccggggtatatgtgatatcatgcatgatcgcatattttacagaatctgcgagcccaaaggtataaaatcgcgcaattgtctcgcgactgagtatctggagcttcgcaggtgatttcaatggatatttgtttaataatctaagcaatgtatcataaataaattggaacatcagatgatcgaaggagttaggaccttcgatcaaataaagtctcttataaaattctttgtctttagaaagacaggtgaaaagaagacggagaagatcgtcttccatgtcattttcaatcagtacctggatcttatctttgatttctttttcgaggatatattcgatgatttcgtatttgtcctgaaaatgtttataaaaagttggacggatcacatcagctccgtcggtgatcatcttaactgtaatcttttcaaaaggcatcttcataataagttctttgaaagagagtgccagcaaatcttttgtcagttcttttttcacttctgtcatttgttcaaatcctttctacaatggaaatattataccataaaaaagagaatgtgattaaaaaagtttctaagattgacagttctttaacatgacttttcaagaacatagtgttgaaatttcttgatatttcggatacatttcacatgatttgtagccaaaaaagaacaacaaaaagaaaatgttcaaactacagcacatttggaaaaaactgaatcttacatgaaaaaaaggaaaatgctagattatgaaataatagtttatacttaagaaaggttccttgaaaagtaaggaaaaggtgaaaaaaatggcaggattaaaatttcaggcagaaagagcagcatttagtttggcagcagataaagtacttaaatatatgaacaagacagatgatagaacgaaagcacttcttaaacttgtagatcttacagaaaattttgcaaaagatcgtttccagccagggtcttatgaagctgcaagaaagatgattcaggatccggacaacaaatgggttcagtatctgaatagacttcttgatgaagtagatccgcatgtccttaagacaacagcattgaatcttggatttgatgcaatgctttacggaacaaagttaatgcatgagtcacgtgaaaaatatcagtgtaatattccatggctgattctgatggatccaaccagtgcatgtaatctgaaatgtaccggatgctgggcagcagagtacggacatcttctgaacctttcttttgaagatatggatcgtgtgatcacacaaggaaaagaacttggaatctatctctatatgctgacaggtggagagcctctcgtgagaaagaaagatgtcatccgtttatgcgagaaacacaacgattgtgtattccatgcttttacaaacggaacacttgtagatgatgagttctgccaggagatgcagcgggttggtaatctgtcattgtccataagtctggaaggatatgaggaagtcaacgacggccgccgtggaaaaggcgtttatcagaaggttatgcatgcaatggatcttttgaaaacatacggattgatctttggaacatcaatctgctatacacgcgctaatattgatacagtaacatccgacaaattccttgatatgatcattgaaaaaggatgtcgttatgcatggtatttccactacatgccggttggaaatgatgcagcactggatctgcttccaacaaaagagcagagagaatacatgtatcaccgcatccgtgagatccgtggattgacaggtggaaaacagctctttgcattcgatttccagaatgatggagagtttgtaggaggatgtattgccggtggaagaaattacttccatattaatgcaaatggagatgcagagccatgcgtatttatccattattcaagtgcaaacattaaagaagtgagcgtgcttgatgcattacgccagccactgtttatggcttaccataacaatcagccatttaacaacaatcatctgcgcccgtgcccaatgctcgaaaatccagaaaaactgcagcagatggtacacgaaaccggcgcaaaatcaacagacctccagtccccggaaactgtagaacacctttgcggaaaatgcgaacattacgccaaagagtggaaaacaaaagccgacgaactttggggtgagagataattaaagtaagagccagaacaggcaccacacacggtaactgttctggctcttatgttacatactttcaaagggatgaggtagagcgggtcggtgcccatggtaatagtagggctgtccttgtgtatcattctaatgaaagtattcgatttaattgtatgaatccaagttcaacaaattcctcttacttcttctgtgattctacttcctgcattttcatagcacgaactttcagaggaagtccgaacaggttgatgaatccgtcagcgtcatggtgatcatacagatctcctgttgtgaagcttgcaagggattcgctgtacagtgagtatggagatgtctctccggcacggatgatatttcctttatagagacggaacttaacttctcctgttacatactgctgtgtaacatcaacaaatgcctggattgcttcacgaagtggtgtataccattttccttcgtatacgatctgagcaaatttatttccaagatctttcttaacttcatatgtagcacggtcgagaacgagctcttcaagctggtcatgtgcttccataaggattgttccaccaggagtctcgtaaacaccacgtgatttcattccaacaacacggttctcaacgatatcaacgattccgattccatgttttcctccgagacggttcagctctgtgatgatttcagaaactttcatctcttttccgtttacgctctttggaacacctgcttcaaatgtcattgtaacatattcatctttgtctggtgctttctctggtgttgtgctcagcacgagaagatcatcgtagtttggctcatttgccggattctcaagttcaagtccttcatggctgatgtgccacaggttacggtcacggctgtagctgtgctttgcgtcaaatggaagatcaattccatgagctttacagtaatcaatctcgtcttcacgggactgcattgtccatacatctgtcatacgccatggagcgatgatcttgatgtccggagcaagagctttgataccaagctcgaaacggatctggtcatttccttttcctgttgcaccatggcagatagcaacagcgccttctttacgtgcaatctcaaccagtttcttagcgattgccggacgagccatggaagttccgagaagatatttgttctcgtaaacagctccggcctttacgcaaggaacgatgaagtcatcacagaattcatcaatgatattttcaatatataatttagaagctccggaaagttttgctctttcatccagtccgtccagttcttctccctgtccacaatcgatgcaacagcagataacgtcatagttaaatgtttctttcagccacgggataattgctgtagtatcaagaccacctgaatatgctaatacaactttttctttactcattttattgcctcctgaatgtattttatcaatttctgttttctcagtttcttgagttctaaagatttctgctttaacaagctaaaacatactatacaccacattttataattatgcaagtattattttaaaaaaatgaataaaatgcataaagacacacataataaacaaaaagaatgcataaaacaataggctataagaagaaatatacaagatatgatgaaaagaatgaaataagaagaaaatcaaaaaaatatttaggccaatatcatcgcctttttatatatctttatatagtaggaaaatactatctacaaacttttttgaaaaaatgcttgcatattatacatgaaagatgtattattatgcaagtaaagcagggaaagtgtatttttatacattcaatttcaggaaatactttacatcccgattaaagtggtatattataaggagaaatgattgcggtaacacgttaccacagtacagtaaaaatgcaattcccagggaacttctattggctcccatggaaatggtaaaagaaaggacttgagaacgatgattaaggtcggaattattggagcaaccggttatgcaggcggcgagctcgcaagaatattgatgggacataaagatgcaaagattgtctggtacggatccagaagttatgtggatcagaaatatgcagatgtatatagaaacatgtttcagattgtagatgcaaaatgcatggatgataacatggatgagcttgccgagcaggtagatgtgatcttcacagcaaccccgcagggactgtgtgcatctctgatcaatgaagaaatcctttcaaagacaaagatcattgatctcagtgcagatttccgtctgaaagatgtgaaggtttacgaagagtggtataaaatcgaacacaaagcaccgcagtatattgatgaagctgtctatggattgtgcgagatcaatcgggacaaagtgaaggatgcacgtatcgtggccaatccgggatgttatacaacatgttctatcctgacagcatatccgcttgcaaaggaaggactgatcgatatgagcactctgatcatcgatgcgaagtctggaacttcaggagcaggaagaggagcaaagcttccgaatctttactgtgaagtgaatgaaaatatcaaagcatatggagtagctacacatcgccatacaccggagattgaagaacagctcggatatgcagcaggagagaaagttgtattgaactttacaccgcatttagttccaatgaatcgtggaattcttgcgacagagtatgcaaagcttacgaaaaaagttacatatgaagaagtaaaagcaatttatgataaatattatgcagatgagaaatttgttcgtgttctagagaaagatcagtgtccggagaccaaatgggtagaaggaagcaactatgtagacattggatttaagatcgacgagagaacaggacggatcattatgatgggagctattgataaccttgtaaaaggtgccgcaggacaggcggttcagaatatgaatctgctgtttggtcttccggagagtgaaggacttgaacttgttccgatgttcccataagatatataaatatagaagcaacaaagttgctaaatcacataatagtgaggacaacagtgagataaagggttgctggtcgcacatcgtgtgaacagtaacgataaaggtggtatgtatgatacgtgtaatgacaatagaggattatgatgaagtatataaattgtggaagaagatccggggattcggaattcgcagtatcgatgattcgaaagaaggtgtcgaacgttttctgcgacggaatccgacaacgagttttgtcgcagtgaaagaaggaaaaattgtcggaagtattctctgtggtcatgatggaagacagggaagtctctatcatgtatgtgtggatgaggcataccgaagacatggaatcggaaaagacatggtcgtgcatacaatgaaagcactccaggcagagaagatcaataaggtttgtctgatcgcatttgcacaaaataatgtaggaaatgcattttggaatacaatcggatggacggaacgacttgatgtgaattattatgattttattttaaatgaagaaaatattacagcatttaatgaacagtagaagggaagcagatcatatgaagattatcgaaggcggagttaccgcagcaaaaggatttgaagcagcagcaacagcagcaggaatcaaataccagggacgtacagatatggcgatcatttacagtgagaaaccgtgtaaagtcgccggaacatttacaacgaatgtagtaaaggcagctccggtgaagtgggatagacagattgtagagagcaaacagaaatcacaggcagttattgtaaactccggaattgcaaatgcgtgtaccggagaggaaggtatgaaatactgtgaagagacagcaaaagaggcaggaaaagttcttggaatcgatgagaaaggtgttcttgtaggttctacaggagttatcggaatgcagatcccaatcgataagatcaaagccggaattacagaacttgccaagggaaagaaagctgatctggcaagtggaacagaagctgcaaaagcgatcatgacaactgatacgaagaaaaaagaagttgcggttacatttatggcaggagatacagaagtaacgatcggaggaatggcgaaaggttccggaatgattcatccgaatatgtgtacaatgcttgcatttattacaacggatgcaaaaatttccaaaaaagcacttcaggcggcaatgagcagtgatgttgaggatacttataacatgatctctgttgacggagatacttcaacaaatgatacagcacttcttctcgcgaatggaatggccggaaatgagaagatcaaagaaggcacaccggaattcgatgcgttcaaagaggctcttcattatgtaaatgagacacttgcgaaggcaatggcgggagacggagaaggtgcaacagcactttttgaagtaaaggttgtcggagcacagacaaaagagcaggcaaaagttcttgcaaaatctgttgtatgctcgaatcttacaaaggctgcaatcgcaggacacgatgcaaactggggaagaatcctttgtgcaatgggatattccggagcgcagtttgatccggagcaggtagatcttttctttgagagctgtgcaggaaagcttcagatcattgctaatggaacagcaacagattatagcgaagaaaaggcaacagagatcctttcacaggaaaaagtgacagccattgctgacttaaaagccggagatgcagaagctactgcgtggggctgtgacctgacacatggatacattgatatcaatgcggattacagaagttgatttatagagaaattattatttctttaaagacgctgaaaagataaaaaagggagacagaaaaaatgacaagcaatatgcagaaatatctggataaagcgcaggtgctgatcgaggcactgccttatatccagcgctttaaccgtaaaatcatcgtagtaaaatatggcggaagtgccatggtggatgaaagtctgaaacgcagagtaatcgaggatgttacacttctgaaactgtgtggattcaaaccgatcatcgtgcatggcggtggtaaggaaatcagcaagtgggttggaaaagtcggaaaagaagcagaatttatcaacggacttcgagtgacagatgcagagacaatggagattgctgagatggttctgggacgcgtgaataagagtcttgtacagcttgtagagagtcttggcgtgcgtgcgatcggaatcagtggaaaggatggaaatcttctccaggttgagaagaagttttcagacggacaggatatcggattcgtaggagatgtcaagaaagtaaatgcagagattttgtatgaccttctggaaaaagatttccttccaatcatttgcccggttggtatggatgaggaatacaatacttataatatcaatgctgatgatgcagcttgcgcaatcgcccgtgcaatgaaagttgagaagcttgcattcctgacagatattgaaggtgtttataaagatccaaaagatccttctacattgatttctgaattagaggtcaaagaagccaaggaattgattgctgacggatatattggaggtggaatgcttccaaagcttcagaattgtattgatgcgattgaaagtggtgtatcccgtgttcatattctggatggaagaatcccacattgtctgttgcttgaaatctttacaaacaaaggaatcggtacagcaattttaaatcagaaagaaagcaggtattatgatggtgaacagtaaaatacaggcggcagaagagaatctgatccatgtatacaatcgatttccgattgcactggatcacggagaaggaatgtatctgtatgatacagaaggaaaagaatatcttgactttgcagcaggatttgctgtgtctggacttggatatgataataaagaactgaatcaggcattaaaagatcagattgataagttataccatacatcaaatctttattttcacgagagctgtggagaggcagcaaaagaattaaaccgcatttccggaatggacagagttttctttacaaacagtggcggagaggcaaatgaaggtgctctgaaagcggcaagaagatatgcttacacaaagaagacaggaagatatgaatttatagcgatgcagaattctttccatggaagaagcttcggagcagtttctgtgacaggacatgattcttatcgtgaaccgtttgagccggttgttccaggtgtaagatttgcagagtttaatgatcttgacagtgtgaaagcactggtaaatgataagacttgtgcaattattttggaaccgctgcagggcgaagggggaatcaatcttgcaacacaggaatttatggaaggaatccgtaaaatctgtgatgaaaatggaatcctgatgatctgtgatgaagtgcagtgtggaatgggaagaaccggaaatatgtttgcatggcagggatttggtgtaaaaccggatattctgactatggcgaaagcaatcggaaacggaattccggtcggtgcatttgcaatgacggaagaagtggcaaaatattctcttcagccgggagatcacggcgcaacttatggaggaaatccactggcatgtacagctgttaagacagtgatcgagatttttgaacgtgaagatattgtaggacatgtaaatcaggttgctccatatctgacaaaaaaactggatgagcttgtggatgagctggactgtgttgtcaaaagaaaaggaaaaggtctgatgcagggaatcgagattacaaaacctcttgcagaagtaaataaaaagacaattgaagaaggacttctgattattcaggctcagggaaatgtgatccgttttgttccaccgctgatcgtagaagaaaagcatattgatgagatgatcgaaaaactgaaacgtgcacttgcataagaaatcttatacataaaaaagccggcatttgcttatactatttctatagggaggtatgagcttatggccggttttttgattgcactgctatcaggtgcgctgatgagtgtacagggagtgttcaacgcgcaggtgacaaagacgacaggaatctgggtaagcaatgggtgggtgcaactttcagcattttttttgtgcctgcttgtctggctggcaactggaagagactctgttgcagcacttatggaagtccagccgcgctatatgttgctgggaggtgtgatcggagcagggatcacatggactgtcattaaaagtgtggatgctctgggacctgcaagatcagcacttttcattgttgtttcccagctggcggttgcttatctgatctcactatccggaatgtttggaatggaaaaagaaccattttcatggagaaaactgattggattgttgatcgcagccggtggaattgttcttttccaatggaaatagaaagttttgcgggtattgtaacaagtctgtaacaaagcgttaaattgtctattgtatttttgagaaaaattcgttacaatatttatgtccggttttaaggggaagtctgactgtctgagaacagtgaggcaataggatgaagaacggatggaagaaaatatgcagatgccgtaaagggcagatgctaaaaggaattgtattgactttaactttggcttttttgaccatgggattgtgtggctgtgcagagaagcatgacgcagcggaagaacttgaagagttcacactggagggagaatctgatgtagagaagaattcctcaaattccaaaacagagtcagaaaaaggatctcagggtggcacagatgcagaagaaggactgccggagacgttatatgttcatgtatgtggagctgtgaatgctccgggggtgtacgaactgaggacagatgcacggatttacgaagcattggaagcggccggtggaatgacagaagatgctgctgcagattggatcaatcaggcagaagctttgagtgatggagagcggatctatgtgccaacgcaggaagaagcagaggagtcagcacaatctgtttccggtcagtgggcagatccgaatggaaatgcaggtggatcagtcagtgataaaattaatataaatacagccgcaaaagaagaattgatgaccttgagtggaatcggagcatcaaaggcagagagtattctgaaatacagacaggagcatggaaactttcagagtatagaggatctcaagaagatcgagggaatcaaggatggcgtgtttaataagataaaagacgatattacggtataggagcgggcaggcagaagaacggccagaaagaggagtatgagcaagaagatattagttgttgatgatgaaaaattaatcgtaaaggggattcggttcagtctggaacaggaaggaatggaagtggattgcgcttatgatggagaagaagcattagaatatgcgagaagatgtgagtatgatcttgtacttcttgatgtcatgcttccgaaactggatggtttccaggtatgtcagcagattcgtgaattttcagatatgccgattgttatgttgactgccaagagtgaggatatggataagatccttggtttggaatatggtgcggatgattatatcacaaagccgttcaatattcttgaagtgaaggcaagaatcaaggcaatcatgcgcagaacagcgaaacgcaaggaagagccggccggcagtccggtgcttgtgaaagggaatatgaagattgattgcgaaggccgccgtgttttcatcggggaacgtgagatcaatcttacagcgaaggaatttgatgtgcttgagcttctggcaatgaatccgaataaggtttacagcagagagaatctgctgaatctgatctggggatatgattatccgggtgatgcaagaactgtagatgtacatatccgtcgtttacgagagaagatagaacagaatccaagtgaaccaaaatacgtacatacgaagtggggagtgggttattatttccaggggtaagaatacattttcatttaagaaaaagatctttaacaatcttagattccgaatttttattatggtgcttcttgccgggcttgtgcccagcgtagtagcactatttggaatcgtaaaagtctatgagtcacgtgctgtgtcacttcgaacagcagaaattcaaaatcaatgtacaattttaacgaatcagatcagtgcgagccactattttgaggacacttcacaagaggtggtcaatgacagcctgaatcagctgactaacatttataacggaagagttatggtaattgacgatcagctgagggtagtcaaggatacttacagtctggatgagggaaagctggatgtatctgaaagtgtagtgcgctgtatgaaggggacgagcacgaataattatgataagaagaatcattatatcgaggtgactgcaccgattgcaatacccggagaggatcagattcgcggtgtaatgctggcaagtgtttcaaccgatagtattgaggattctctggatgtattatacacacagggaagcgtgattattggtcttgtgatgatttttctgacgattgttgcagtgtttgcagcagatcgtgtagtacgtccgctgcatcagattgcagctacgatcgagaatgtaagtgcagggtatagcgacgatgttttgcatgtggatacatttacagaaacgaaaagtatcagtgaagcaattaataagatgatgggaaggctgaagcttttggatgattccagggaagaatttgtatccaatgtatctcacgaactgaagactccgatgacatcgatgaaagtactggccgattcacttctggagcaggagaaccttccggttgagatgtatcaggaattcatgggtgatattgcaaaagagattgaccgtgagaataagatcattacagatcttttatcacttgtgaagatggacaagaaggggcagacgctgaatattgaatccattaatatcaatgaacttctggaacagattttgaagagattaaaaccaattgcagaaaaaaagaatgtggagatcgtaatggagagctttcgtccggttacggcggagattgatgagacaaagctgtcacttgcgatttccaatctggtagaaaatgcagtaaagtataatcatgataatggatgggttcatgtatcattgaatgcagaccacaaatttttctatgtaaaagtagaagattcaggaattggaattccgaaagaggatcaggcgcatgtttttgaacgtttcttccgtgtggataaatctcattccagagaaatcggaggaacaggacttggacttgcaattgcgcgaaatgctgtgattgcacatagaggtgcgatcaaagtattcagtgaagaaggcgaaggaacaacatttactgtgagaattccattgatctatacagcttcttaggagaaaagttatgaaaaaaagaaaagggatcgcagtgttgcttattctgattctttctctcgcagtaactgcgtgtggggatcgttatggagtaaagaaaggcgaatcttacatttactgtatgaatacagataagacaggacttgtaaaggttgcagctaagatcagcggcaattctgcgataaaaagggcggaatctgtaatcgatgagatgaagaaaccaacgaatgaaattgaatatacacaggcaattccggaacaggtgaaattgctcgactgtgctttaaagggcagtatccttgagattaatttcagcgaagaatattatgaagtgaaatccttagatgagaaactgatgcgggcagcaattgtgcagtcactgcttcagattgacggaattgatgcggtatctgtccgtgtggaaggagaaccactcaaagacgatgaaggaaatgaggtcggtctgatgaatgaggacgatattgttgacacgacaggttcttcgttaagttcttatcagagtgatacattgaagttatattttgcagatcagaatggatccaaactggtcaaacaagaggtggacgttcattacagcagtaatgtcttgaaagaaaaactgattgtagaaaagctgatgcaaggcccatctgaggagggggcatatccaacgatcaatccggcggctaatctgttgagtgtaacgacaaaggatggaatctgttatgtgaattttgacagcacatttctgatcagtgcgtatgatgtactgcctgagatcacgatttattctattgtggattctcttgtagagggagcaggagtaaggcaggtacagattacgatcaatggtgaatcgaatgcaaaatacatggagaaggtggacttgtcacagccattgaatgaagagcaggactggatagcagcagataacaaagaatgagaaaacgcccgctctgtatggtatgtcttatactgattgccatacagcttgtaagagtgagttttttacagaatacaaaagatcagaaaccgtcccttgcagaaacattgatttcggatgagaaagatgtgatttgcgagggcacggtttatagaattgaaaataaatcacaatcaactgcaatttatctgaaagatgcggttgtttcttgtacagatcaaaagagtaagaatcagataatcaaagaaaagaaaatccttgtaacaataaaaaataataaatccggtaaaaaaatcagaatgaaaataggacagaagttgaatgtgtgggggataaaacagtcgtttcatccgccgaggaatccgggtaattttaaccaaaaaagttattatcaaaaacagggaatccatgttggggttttaacaaaggcagaacagattaagatagttttgtctgaaaaagacaagaactggattgtatcacgatggaatagcatacggaatcagctggaccggctgaaaaattactggaactggaagattgtaagccagatgggaaaaacacatggcgcgatgctttctgcaatcttgttgggagaaaagagcggacttgatccggagatgaaaaaattgtatcagaagaacggattaggacatctgcttgcaatttcgggattacacatgtcactgatcggaatgtctgtttaccggttattaagaagaatgggaaattcatttctgttttccggaattgccggaggaggaattctgtttttttatttggttatgacaggtccacaggtatccagtcttcgtgcacttcttatgttttttatccgcatgggggcagaaattaccgggagagatgtggatcaacctacaagcctggcggttacagcagctattttaagcatatatcaaccgctgtatctgttagatgcagcatttttactttcgtttggtgcaattcttgggattttattattgtatccaatttttgaacagaaaacacgtttgaaagcatgggaaggatttaagattagtttagctgttaatggaatgcttctgggaatcatgctgtattattattttgaggtgccgccgtatgcactcgttttgaatgttattttaattccgttgtttccatttgttatgttgacaggtataggtggaattttgttttcagaattatcgggaaccgtaggaaaaattggattcagaagctgtgatcgcctgttgtccttctatgataaattatgtgagctgacatcagcgcttccgggcagcaggatcgtgaccggacagccagagttatggtgggtgcttatttactatggtgtgctgttgtttttgtgcttcctgtttcatgcaatgaaaaatgagacagataaccggagaaaacaggcgggattttcacttcttgtttgtattgtcatagcaggatcaatctgcggatgcggaatactcaataatgattcaaaaaaccttcaggtgactgttctggatgttggacagggggactgtatttttataagagatagggaaggaaagaaaatgctggtggatggagggagcagtgatctgtcttctgtcggtacttaccggatagagccgtttctattatcgcagggggtcagaaaactggagtatgtttttgtgacacatggtgatgcggatcacatcaatggaatccaggaacttctgcaaaatcagaaacagggagtgaaaatcgatgcgtttgttctgccgccggaagaatatatggatgagaaattactccatcttgcagaaatagcgaaagaaaatgggacgagagtgttgacaatttatgccggagaaaaagtaggaacgtatttaaaatgcatcgctccgttgacaacgaggaaaaacgagcgtattcgtggcaaggaagaggagatgcctcgtctggaagcgggaaatgaagcatctgttgtacttgaattgaaggatggggcgtttcaaatgcttctgacaggagatttggaaggaagaggagaggaacagctggtggaaagcggagcattggaaagctgtccaatcttaaaagcaggacatcatgggtcgaagaattcgggaagtgaagaatttcttcagattgtgaaacccagattaacattaatctcagcggggatagaaaaccgctacggacatccacatgaggagacgctggaacgcctgcaggaaatcggaagtgaagtattgtccacgcaggaatgtggtgcaattacactaaggagcgatggacgaaaaataaaggttcacaagtatttataaaacaggaacaggtgataaaaaggctcttgtcaaagtattggttattcatttataatagaatagttatgaagaccttaaatgaagatttaaaatcaggacaatttaagcaggtatatcttctttgcggagaagaaggatatctgaagaaacagtataagaaccgttttgtgaaggcaatgcttccggaaggtgatacgatgaactattcgtattatgaagggaagaatacgccagtgaaagaagcaatcgatcttgcagagaccttacctttttttgcagagcgcagactgatcgtatttgagaatacgggattttttaaaactgcggcaggggcagatctggcggattatattaaggacatgccagagacaacctgttttatctttgtggaagaagagattgataagagaaataagctctataaagcagtgaaatcaaaaggatatattgcagagctgtccacgcaggatgcaggaactttgaaacgctgggttgcaggtctggtccgaaaagagcagaagcagatttcggagtctgtgattgtgtattttctggataaagttggaacagatatggaaaatatccagggagagttggagaaagtattctgttatgcactggagcgggatacgatcacgaaggaagatattgatgctgtctgtgtgacgcagattacgaatcatattttcgagatggtagatgcggttgcagccggaaatcagcagaaagcactggatctgtattatgaactgctggctttaaaagaaccgccgatgcgtattctttttctgctggtgcgtcagtacaggatgcttttccatgtcaaggcacttgcaaaccaggggtatggaagaaaagagattgcgtctaaagcaggcttacatccatttgtggcaggaaagaacatggaacaggcgaagcggtttaagatgggacagctgcgccgtgtgatggaagaaggggcacagttggagcaggatgtaaagacaggattgctgacagacaatcttgcggtagaactttttattgtaaaacagtcagaaagatagatggaggtaagaagtattgtcaacaattgatcagagtcatattagaaatttttgtattatagcacatatcgatcacggtaagtctacactggcggatcgtatcattgagcagacaggacttttgactagcagagaaatgcagtcacaggttctcgataacatggatctggagagagagcgtggaatcacgatcaaagcacaggcagtccgtactgtatatcaggcagatgacggagaagagtatattttcaacttgatcgatacacctggacacgtcgatttcaactatgaggtatcccgaagtctggcagcctgtgatggagcaattcttgttgttgatgcagcacagggagttgaggcacagacgcttgcgaatgtatatcttgcactggatcatgatctggatgttatgccggttatcaacaagattgatctaccaagcgcagagccggagcgtgtaaaagaagagatagaagatgtgatcggaatcgatgcggagaatgcaccactgatttctgctaaaacaggactgaatgtacatgaagttctcgagcagattgtacagcagattccgtcaccggtcggagatccgaatgcaccgcttcaggcactgatctttgattccaagtacgattcttacaagggagttattgtattttgccgtatcaaggaaggtacggtcaaaaaaggtacaccgatgcttatgatggcaacaggagcgaaagcagaagtagtagaagttggaacttttggagcgggacagttcattccatgtgacgcacttgaagcaggaatggtaggatatatcacagccagtcttaagaatgtaaaggatacccgtgtcggagatacgatcacgaatgcagagaatccttgtgcagaaccacttccgggatataagaaagtaaatccgatggtatattgcggactttatccggcagacggagcaaagtatccggacttgagagatgcacttgagaaactgcagcttaatgatgctgcgcttcagtttgaggcagagacatcggtagcacttggattcggattccgttgtggattcttgggactccttcatctggagatcattcaggaacgtctggaaagagagtacaaccttgatcttgttacaacagcaccgagtgttatttacaagatccataagacaaacggtgatgtgatcgatctgacaaacccgacaaacatgccggatcctgcagagattgaatatatggaagagcctatggtaaaggcagagatcatggtgacatccgagtacatcggagcgatcatggatctgtgtcaggaacgccgtggaatctatcagggaatggaatatattgaagagacaagagccgtgttgacatatcatctgccactcaacgagattatttatgatttctttgatgcattgaaatcaagatccagaggatacgcatcttttgattatgagatgcttggttatgtacgttccgagcttgtcaaacttgacatcctgatcaacaaagaagaagtggatgctctttcctttattgtattcgaaggaagcgcttatgagcgtggaagaaagatgtgcgagaagctgaaagaagagattccaagacagcttttcgagattccgatccaggcagcagtcggaagtaagattattgcgagagagacagttaaggcaatgcgtaaggacgttcttgcgaaatgttacggcggtgatatttcacgtaagaagaaactgcttgaaaagcagaaagaaggaaagaagagaatgcgtcaggttggaaatgtagagattccacaaagtgcattcatgagtgtcctgaagctggatgagaactagataaaagaaggaaggaaaagatactgtttttatcagacagtatctttctgtatttaaagatgaaaaagagaaatttagaattatatctccatattccgttctgcgtaagaaaatgtaattattgtgattttttttcagcaagtggaacagaggaagaacaggcagcttatgtcagtgctatggttcaggagattcagagttatcaggaattatctggagagtatgaagttcagaccattttcctgggaggcggaacaccgtctcttctgacaccggaacagatagaacagatttttaatgcaatttatcatacattttcagtaaatgagaatgcagagatcacaatggaaatgaatccgggaacagttgatatcgagaaacttcatgccatgaaagcagcaggggtgaacagactgagtattggacttcagtcggcacaaaatgaagaactgaaaatgctaggaagaatccatacatttgaagaattccttgagacttggaaactgatagaacaggctggattcaaaaaccggaacatagacctcatgtccgcacttccgggacagacgatagaaagctacgaagatacactttcaaaagttctggcacttgagccggaacatatatccgcatatagtctaatcttagaggaaggtactgtattctatgattggtatgaaaaaggaaagttagatcgtggtgcatggaaacttccatctgaggaagaagaatatgcgatgggagagttgacaatactaagattcgcagaagccggaatgcatcgatatgagatttccaattatgcaaagccgggaaaagaatgcagacataatctgggatactgggacagaacggaataccttgggattggagcaggagcctcctcattgatcaaaggagagcggtttgatcatattcgagatcggaaagcatatattgaaaagattagaaatggcgagtcgattcttattgacagagaaattctttccgtggaatcgcagatggaagagttcatgtatctggggcttcgaaaagtagagggagtttcgagaacagattttcagaactgttttggaaagaatgtggatgatgtttatggaaaaattcttgataaattagaagaagaacaattgctggaatttagtggagatcgaatcagactgacgcatcgggggatggatgtcagcaattgtgtgctggcggagttcttgttttaaaggctgaaaaccaaaattgtgcaaaatcaaccaaaaacagtcatgaaatttgttgattagtttgattgactatgaacgagtttgaacgtataatacaagcataaagaaaaacaatggtcagagagaaggagaatgcaaaatgatttacacagtaacatttaatccgtcattggattacattgtctctgttgaggactttaagcttggacttacgaatcgaacgagttcagagctgatccttcccggtggaaagggcattaatgtttctacagtgcttggtaatcttggtatcgagaatactgcacttggatttttagccggatttaccggaaaagagattgaaagaagactcaaagagatgggagttgcatctgattttattgagatcaatgaaggtgtatctcgaatcaacctgaagttaaaatcaatcgacggaacagagattaacggaagtggaccggtgatttctccggaagatgtagagaagctgatggagaagcttgacaaacttggagaaggtgatgtcttattcctggcaggaagcattccgacttctatgccggatgacatgtatcagaagattatggcgaagcttgatggcaaaggtgtcatgatcgttgtagacgcaacgagagatctgctgttgaacgttcttgaatatcatccatttttaataaaaccgaacaatcatgaacttggagagatttttgatgtggaacttttgacaagagaatctgttgtaccatatgcaaagaaactgcaggaaaaaggagcaagaaatgttcttgtatccatggcaggagaaggtgccgttcttgtagcagaagatggaagtgtttatgacactccggcgccgaaaggggaattaaaaaacggtgttggagcaggagactctatggtagccggatttatggcaggctggatggagaaacatgaatacagacatgcattccacatgggagttgcatcaggaagtgcaagtgcattttcagagaatctggcaacaaaagaggagattgccggagtatatcaacaggttgtaaaggaggagcggtaggatgaggattacagatttgctcgataaaagaagcattgcctttgacaagaatccggcgaataagcaggaaactttggatatggccgtggatttgatgtgtgcaagcggcaagatcaatgacacagaagcctacagaaagcaggtttacttaagagaagaggaaagcacaacaggaattggtgagggaattgctattccacatggaaaaggtgattgcgtaagcaagccgggacttgcagcaatggtcattaaaaatggtgttgatttcgattctctggatggagatccggtaacacttttattcctgattgcggcaccgaatacagaggataatgttcatctggaagtacttagtaaattgtcaatgatgctgatggatgagcagtttacagaagctctgagaaatgcaacctctgcggaggaattcctttctattattgataaagcagatgatgagagagctgacattgatgagcaactggcagatacaggaaatgcagagagtgattttaagattcttgcagtaacagcatgtccgacaggtatcgcacacacatatatggcagcagaaggaatcgagaaagcagcaaaagctgccgactgtttcgtgaaaatcgagacaagaggaagcggtggagcgaaaaatgtgctgacagaccaggaaattgctgatgcggattgtattatcgttgcagcagacacacaggttccgatggatcgttttgacggaaagaaagtaatcatctgtcaggtatcagacggaatcagtaaagcagatgaactggtagctcaggcgaaagccggaaatgttccggtcttccacggaaacaatccggctgcagcatcttcttccgcaggaaagaaaagcggcggagtcggacatcagatttacatgcagttaatgaacggtgtttcccatatgcttccacttgttgttggtggtggtattctgatcgcgatcgcatttctgattgacggattgtgcgtagatctgaatgcacttccggctgaccagagagcaaattttggtatgatcactccggtagcagcagtatttaaacagatcggtggaacagcatttggattcatgcttccggtacttgcaggatttatcgcaatggcaatcggtgaccgaccggcgcttgcagttggtcttgtaggcggtatgatggcagcaagcggaaaatctggattcctcggagctcttgtagccggattccttgcaggatatatcattgtacttcttcgtaaagtatgcgacaagcttccggatgcactggaaaaaatcgcgccggtacttatttatccattgatcggtgttcttctgatcggacttgctatgatgtttgtaatcgagccaatcatgggtggaattaacacaggcctgaataatgcattgacaggtatgggagattcaagtaaagtagtattaggactgattcttggaggaatgatgtccatcgatatgggtggtccattcaacaaggcagcttatgtattcggtacagcatcaatcgcagctggtaattatgatattatggcagcagttatggttgcaggaatggttccgccatgtgccatcgccctttccacactgctgtttaaggataagtttacaaaagaagaaagagatgcaggtccgacaaactttatcatgggtcttgcatttatcacagaaggagcaatcccatttgcagcatctgatccgctgcatgtacttccatcttgtatcatcggttcagcaattgccggtggaatgtcaatgctgtttggatgtacactgatggcaccacatggtggaatcttcgtattcccggttgttggaaatgcagtaatgtatcttgtttccctcgtagtaggaacagtcatctccgcagtactgcttggattgcttaagaagaaagttgcataaagtaacaaatatttggatgaaatgccgaatagaataatctgtcaaaaccattgaaaagaatatgtaactgttcagagccaagcaaaatttcaaaaaacaggtgtaaaatgcttgaatttttaagactgtttttgaaattttatttggcggatacgacacaccgacgaaatgcgtagcattttggaggttggctctgaacagttacaagaatataagaatcaggaccgggagtcatggatcaagaagcaggcgcttgagattcatggcttcaggtccttttttaaaaggagataataaaaatgcttacagaacagagatatcagattattttggatttgctgaaagaaaagaaaagtgttacggcgacagaactgaaagagatcttagacacatcagagtctacggtaagaagagatattactgcacttcataaagccggaaagcttatcaaggtatttggcggagcggttgcgctagaagatgaaggcactgtctctgcttatgaaccgacagttgagcagaagagcgaactccatgtggaagagaaacggaaaatcgcgcaatatgcggcagaactgatcgaggaggaagattttatttatctcgatgcaggaacaacgacaggttatatgattgatgctcttggacataccaatgcagtttttgtgacaaatgctgtttcacatgcacagagactggcagctaaaggaatcaaagtgtttctgatcggcggagaacttaagaactctacagaggcagtgatcggtgcccaggcaatgaagaatctgcaggaatatcattttaccaaaggattctttggagcaaatggaatcacaaaagcagaaggattcacgacaccggatgcgaatgaggctctggtgaaacaaacggcgatcgagagatgcaggaacaggtttgtccttgcagatcattcaaaattcggatgtatcagttcagtgacattttctgcttttgcgaatgcaaagattctgacagacagctgtccggcagattatcaggagatggattgtgtgataggggtggaagtagcaatgttcccaacagaataagaatgaatgtaaagattctgacagataactgttcgacggaatttttgtataatatagtggacatgtttatattttatactatcagccagacttttgaagtctggctgtaattttttgtcatgaaatggaaaaagaagaattaaacaatagaagaaataatttttactgtaatttaatttattttaattgttatttgaaaataaatatgctaaaataaaatgacattcactaaatgtcaaaacataaaaaggagagtggagactatggcaatatgtccgttttttgaagaatcaatgtggaatggtaataagtgtaaagcaagtggtggaaaagatggggcaccgatacagaaacggtatgcagattattgcggagctaatttcttatcatcagattatcacaaatgtccgttgtataaggatgcgacaggaaaaagcaatagtagcggtggatgctatttaacgtcagcttgcatgagtgtaaaaggagaagaatttctagatgattgtgatgaacttgaacttttaagaaattttcgggattcatatgttaaagagaattatccgcaggacatagagaaatattatgtgattgcgcccaaaattgtagagaaagtgaaagggctgaaagataatgtagatgtgttcctaaaaatgtattatgagttagtactgccatgttgcaatttaattgaagaaaacaaattgtatgaagcatataatagatataaaaattattcattagaattagctgaaaaatatttacaatagccgctttatttcgtataccttttaatcactatttcagtacctgatatatcaaaatgctcataactgcgactcattctctgagatatgagagaccagaaaaccttgaatcttcaataagaacatttgattatatgaggagtggtaataattatggaaaaaaattatgaaagacagaatgaacaattaagaagaaatattgaattattagaacaaggaattacagtaaaaaaatatttacagatagaaaatgatatagaggtcgagggaagtacagcaatctataattatttcggaatctttattatatatagtgaatctgaaaaaagatttattttaaaaggacatccagaaaaaaaagacgaatattcaaaaaaatatatgggagattatatacatagaattatagatcccaagagctataaaaaacatttgcgcagatgtttcttgaatgatttctatatattaaagtattataggctaaatccaaaagagttcccaactatagaagaatatttagtcagaaaaggagatacatgtgaaaaatatataaatgaattcattcaattgaatggtaaagttttacaggaatattgggatatgggctatttacattatacttctataaatgatgagaaaacgatagtaaaataccaaatacaagttatggcaagaagcttgttacatttaagaaagaagagtcgatttttgtatgaaatattaaatatgatagttgatattcttgttaagtcattgccattttttatctggctgttatatatgaataaatcatctttattaacaggtgtaaatatagttcaaaagggtagttctttaattgctggaattctaggaaattatttagcaggaatctttatgtatcttatatgtttggtgatgatttttgttatagatttgattgtgtttaaaagtatatatacaataaaactgaaaatatttgattggataattgataaaagcgtataaaatatataattttttaagattttcattaaggcatccattaggatgccaaataatttgctgaaagtgatttctgtcattttattaacaaggaaggagaactgttcaccaagagttctcaggtatttactttgtctttgttccattgagcaacacatattctggtaaatataatggtcacgtgggctattagtccatctttacaacagtcaccttttaggattaagaaaaattactgttcagtaatgtatcacaacttacatttaagacagaagcaatagctttcaattcaatatcagtaacaaaacgttgtccagattcaattctttgaatagcatttttgtctacatcaagcccgtgtatttgaagcatatctgcaaatttgcgctgagaggttttttcgggaagttgtaaacgcaattctttaattttttgtccacaaatattattaaatccagttgaagatttatttttatacatagataaactcctttctaaaaatgacattcactaattgtcaatttaaaaagtatatgataaaataaaacaaaaaatgacacctactagatgtcaaaggcgattttatttacgaaagggagaagaataatatgaaaaagaaaacatcgctattattaatgctagtgttcattatgttgtgtatgacagggtgttcgtcagtacccaaggaaaaacaaatcaaacaagatataatggatgcaagttcctcactcgcattagctgagaatgaaaaagtagttgatattgaaatcaaggatagaaaaacggacaaaaaagctaaaagtgatcaagtgatatgtatcgtaaaaacagaattagacaatgtttcttatgaaaaaggatatacattgtcatatcataaatttgataatggatggaagatgcagtctattattataggcgaaagtgctgattgggttataaaaccattaaagggggttaatgaagaacagattaagaattctttagcttacaagacaataaatgttgatggtgagttgtggacaatcgaagatggagaaatttccgatattgttataaaaaaacaagatacagatttagataaagggaaagataaagtgactattaagataaaactaaatggagaagtggaagaagttgaaggtacaatcaaagcagaatatgattttgataaaaaatgggaattaaaagatatggaagacgagaatgatttttcatcgaaggaaaaagcagataaagctttaagtgttaataaagaagatttgattgctgaactttcaggaagagagatatcagttggagaaacaaaatcagatgttggtaatggaatttcttttattgattattcgacacaacagaaaataaagataaatacagatgatatatcagaattcacaatcaatcaacagacaaaagaagagaaaggaaaaggcgtaacatatgaatgcagttgcaaattgtcaaaagcagatgtgcaatatactcttcaagtaaagtatttttattattatgatggaacatggaatgatccaagtgtaacaattactcctgtgttagatacggattcaattaatttgagtggaacttggaaaggaaattatacaggagcaggatcttctggaacagcagagctagatattaactcggaagatgggataaattattctggtacttatacatatacttcggataaatcatatgtaaattctggaagttataaagtagaaggaacatttgacaaagatacaatgcaattaaaattaaaagcaggggattggatttcgaagccagatcgtccactttctgttgaaaaacaggatattttagcaatctattatgtggatagctcaaagctgaatggaaggggacaatgtggagatatatttaatataaacaagtagataaagttaaaaatctgaaggagaagatgagttgaaaaagtggatacaaaggataatatttattattctaatattgattgttattgtaatggtgtcggtattaggatatcaaaaattatataaggataagaaacaaaaacaagagggagatgttattgtaaaagaaaatgtaaaagtcattacttcagatatggataagaaaaagaaaccgataaatgtgaatgatgataaccttgtctttgaatcaaatccgaaatacaaagaaggagacgtaattgttgcaggtgagattagtggagctgaaaatggatttataagaaaagtagtgtcagttaaaaaagcaactggagggtatgtagtagaaacgcagtcagctcttctaacagatgtgtttgaaaaagcatatattgaaaaaagactaaaattaacaaaagatggagtgcaagaagtatctaataatgtgagcaaaaaagatactgataaagctgtagagacagtacagatgatgtccgctaaaatggaaaagaattattctgtgatagagatggcagataagaaaaaagatagtagttcatcagatggcacagaaactcaagatgattcgaagtcaaaagaagatagtgacaaaaagactcaaaaggattcaaagtcaaaagaagatgatgacaaaaagactcgaaatgattcaaagttaaaagaaggcagtagcgaagagactcaggatgattcgaaatcgaaagaaagtgataacgaagatccagagaaagaagaaccagaaagtgagtatgattttggaaaagcttttgaggaaacgatagatgatgttacgatttcaggtgatatgggagttgatcttgaagttgaattgatgttagatattaatcatggaaatatcaaatatggcatggcgatgtataggaaagcgggggcaaatctttcagttgatttgaaagaaagtatgagtaaagagcatgagaagcaactgtttgaaaaaaaattacctaattatacttttgtcgtggcaggagtaccgattgttataacgaatcaattagaatcaaatcttacaggaaagattggaattgagggaaattggaatatgtcactttcctggttagatgaacagactgttggatttatatatgatagtaagacaaataaagtgaaagagattaaagatccaaaagagcagaaagatatttcagatggaattgagtggtcaactattgcatcagcaaaaggcgatgcctccgcaggaatagatattcatttaattacaaagatatatggaacatgtggaggtgatatctcagctggaatctttggaaatgcatcaggtgaggtgagtttgtctaatcgagaggatcaatactatgcaggaacagtaaatctgagtattgttcctaatcttacaggaaagcttgttgttgaccttccacttgtatcagaggaacttatggaggtggaaattttcaataaagatttaccggcaatttgggaaaaagagtggaaatccagctggaatccagacgatgatttgaattattctgataccggggagcagtggaacttatataaaaccagatatggggaaacatataatgttgatgcgcaagagtttcaatttaaaattcctttaggatggaacgttgaaagcgaagaaataggggaaccaaatgatgaaattatggaaaaggttgtgttatctaatgagcgcggtgttacagttacattttggtctctagtacacaaattgggaggaaggtctggtgtgtctatgttacaagcggatataacaaaagcggatgattcagaattcgttccgagttttccaaatggaacaaatacagacttctcatcattaggcaattttattgtagcgaaagtacatattattggcgaattggatatgaagagagattcagattttactcccgtagattcaggaactacattttatgcagttgttccagaatcttatcttggaacaagagaatttgtaggacaagctgggaatgtagatgaattttcttttgactatccaacaccatatgcattcattgcagaggcaccagatggaacctttactgcgggtgaagaaagagatgtggttaaaatattgaagagttttaaagttgcagagtaaaagaggaaaatgttcacttataaaatagcaggcggagcccccgcctgtttttaaattgaaatttattgcctttttaggtaggcgtttttcatacataatacttaattcatcatatacctgtcctcggttttgaatgatcatagtccgttttttgtagcttcatcgaaagtacaggaagcatttgaaagactggatcattatgtgtttcatccttaaaatgaattgacaagatataaaatcgctggtagggtaaaaaggggagtgtgataggagaaaaaatggatacaagtactgaaaaacataattttccacattcaaaatcagagaaagaagaggatatcttagagcagttgtgtatctggaagacacagaatatctcattagatctggaacgaatctgtcagcatttcagaatggagaaaagagatatagtggtgtgtctcaagaggatgcaaaaggaaggatatcttgaaaaaataattgcaggacaggagatacaattgacagattatgggctatctgtaggaaatgattgtatttaccggcataattcaatcagtcagatgttacagtttattggtgtaaatgaaaagacggcagaccaggatgcatgtcggattgaacacattgtaaccgatgaatctacgagagcaatctgccagtttatcaattatgaaaacatgtactatgagagaagaataagaaattcagaactgacagaccgttatgaaaaaggaaactatattttttcaatgcagatgtatagtctggagcaacgctgtcctagaaaattaaagaaggaatatcattgttattccaggaatgtaatttttgaaataacaaaaaagggttattttaaattacagaaagtgagcagtctgggaaacaaaagattatggtataagaactatgataaacagtgggttttagctgaacaaggagcacaaggagaacagattccatccagagtctttgaatttattataaagccgaatgacagagtgattgagggaaaacttctgattgcatttatgccggagaatcagacagaaccggaagtgtgggactgtggacaactagaagtggaaatatggtagaggaattgagtcatgaccaggaaccagacagtagaaattaatcatctgacagtattacaaattcagtatctgacagaattggaacaactggaaaagggaagagggacaattggtgcagttgctgcaaaatgtggcgtaaaacatccaacagtaagccgattctttaaaagttgtatagaaaaaggatatctgaccgaaagtcttgaattcacggataaagggaaaaagatgctccgttggcatcagaaagtccaaaaagacgttagggagtatctggaacgcagtgggattacagaaggaatcgatgatgttctgaaaggaatgatcgaaaatattgattacagaagactggaagaacttacaaaaagccatatgcgaatcaataaagaaattcaaatgcaaaaagaacagaatcagattagaaacatagaagaacttgtggagtatggcaatcatccagttgtgatttctatcctgcagacagatgggagtcgtcgatccatggcagaaaatggattcgaacctctcgggattgtgaaacgtaacaaaagaggctgttatctcgaattgacaatcagagaaatgcatgcggtatctcggattaatggaaaacagatgaaagggcatcttacctgtctgaaatatttgcaaggggatatgtataaaattgcagatgtaaagaacggaaggataaaaatacctttgaatgcatgtggttttcagaattttgaccatggaacgttacgtggaaatcttttgattactgtgtccagttcggttggagaagcacatatgccagagagtacagcacgattgatttttaagctgtaagtgttaaaaatgcgagaggttaacagataatagatttaataaatatgttttaaaagaagtaatgtatgtaaaatcaggagcatatagtacttctttttttatggtataatgccgctgttttacaatttattaacaagtaaaaagaaaaaaaatattgataaaaattatcaaatagtatgaaaaataacgtatttataaggagattagaacatgaagatttcgtacttaagggtacgaaataagtggaaaaatattgacagtcagaaagagcataatatatattttaacaggataatagtcataactaacaacaaatggaagaaactaaccttgcgtgttcggaaatgaccatcattatcttataaatacagatgaaaataagtgataaaggagaggagtatggagaagaaaaataaaacgagaaaaaatcctttaaaaatagtatggattgtgcttggatttctttgcctgggacttggtacgataggaattgtacttcctatcctgccaaccgttccgttttatatggcaacactattttgctttgcaaagagttctaagaaattgcacgactggttcataggaacgaatttatataagaaacatctagatagttttgttcagaaaagagctatgaccatgggaacaaaatgcaagattatcggaatggtaacagcagttatgttgattggttttatctgcatgaagaatgtaccgattggaagaatctgtatcgcagtggtttgggtatgtcatttgttatacttcttcttaagagttaagacagaaaatccagaagtcaaaatggcagaaacaggagagtgagatggacaaagtagaaaagaaacgacaaaaagaacagtatgtcgtggaagagatgattcggctgtattgccgaaaaaaacatccgaaagaagaaagataggaggggcagatgtgtccagaatgtcaaagactttcggattatgcaaaacaaagaagtcaaaagtgtccatttatggaagaaaagacgttttgtgcgaattgtaaggtgcattgttataagccggagatgagagaacagatcaggcaggttatgcggttttcaggaccacggatgctgttgtatcatccggtgcttgcagtatggcatttgatatgcagtaggaaataaaaagaacaaaaaaagaaacgaacaagccacttgaacaataatgttgtacggtagtaaacttcatttctctgaccgcattataatttaagtcgtataaatttgtctagaaaaaattcttacaattataataaaggagttacttatgattaaaacaagactggtggggctgttgtcccacgcaaaaaagtatatcgtgtatacgattttgtggcagtgggcagctctcctgtcacaagtgttagcggtttttactatcgcagatttactggaacgtgtagtgtaccaggcagtaaccgtaccgatcattgaacggaccataatgatcttagtcctggtcgttgtgattcgttttgtatgcgaacggatgggagcaaagtcttcttatctggcgtgcgtggatgtgaaacggattctgcgcgaaaagatttatgagaaaatgttgaagctgggagcttcctacagtgagcaagtatcctcttcggaggtcgtacaggtgtcaaccgaaggtgtggagcagttggagacatactttggaaaatatctcccacagttattttacagcctgatcgcaccgctgaccttgtttatcattctttgtagagtgagtctgaaagcaagtgtcatcctgctggtctgtgtaccgctgattccaatttcaattgtagtcgtacagaaagtggcgaagagattattaaataactattggagtatctataccggactgggggattcgttccttgagaatttacagggacttactacactgaaaatctatcaggcagaccagcagaaagcagacgagatggatgtggaatcccagaacttccgtaggattacgatgaaagttctgaccatgcagcttaattccaccagtgtgatggatattgtggcatatggtggagcaacgatcggtatggcagtggctgtatctgaattcttaaagggaaatattagtgtagcaggaacattatgtatcgttctgcttgccagcgagtttttcctgccgctcaggctgcttggttcgttctttcatatcgcaatgaatggtatggcagcgagtgataagattttcaagattttagatttaccggaaccacaggcaggagaaaaaacactgccggacggagcgttagatattacattaaaagatgttcatttttcttatgaagaggacagagagattctaaaaggaatcaatttaaatcttccggcaggaagttttgtatcactggttggtgaatccggatgtggtaagagtacaatcgctggaatgcttgcagcaaagaaccggggatacagcggagaaatcaccatcggtggtgtaccgcttaacgaagtgaatgaaacaaatctgatgcagagggttgttctggttcgccataacagttatctgttcaaaggtacagtagaagaaaatctgaagatggcaaaaccggacgcaacgaaagaagagatggaagctgttcttcagaaagtcaatctcttagggttcttacagacacaggatggcttgcagacacagttgctggaaaaagcaagtaacctgtccggcggtcagtgtcagagactggtgattgcaagagctttattaaaagaagacagcaaggtttacatttttgatgaagctgcatctaatatcgatgtggaaagtgaagaactgatcatgaatgtgattcatgatcaggcaaagacaaagacggtgcttctgatttcccatagactggcaaatgttgtgaagtctgataagatttatttcttaaaagacggagaaatcaaggaaagcggaaagcatgaagaactgatgagccagaatggtgcgtacagacatctgtatgaaagtcagatggcattggaaaactatggaaaaggagaagtggcataatgagtgaaaatacgaatacaacaaaacgcagaagtgccctccagattatgggaagtctgattggtctggtaaaacccctgcttcatatcatgctggcagcaatcattcttggaacattgggttatttgtgtgcaatcttcctgacgatactggcagggcaggtcatcatacatggacttctgacaggggtagccggaatgattgttccagtggacaatatgtggctggtaattaccccggtaaaaacgattataacagtcatgatcgtaattgcagtgcttcgtggaatcctacattatatggaacagtattgtaatcattttattgcatttaagctgttggcaattatccgccacaaagtgtttgctgccttacgaaagctctgtccggcgaagctggaaggacgagataaaggaaacttgatttccattattacaaccgatattgaattactggaagtgttctatgcacataccatttcgccgattgcgattgcaacattgacttctatcattatggtgatttttattggaagatatcactggttggcaggtctgcttgcactggcagcttatcttattgtcggtgtagctatcccaatgtggaatggaaaacgtggcagtcagaagggaatggaatttagaacaaactttggagaactgaatagttttgtcctggattccctacgtggactggacgagaccattcagtatggacagggtgaaaagagaagagagcagatgagcaagcaatccaaaaatcttgcaggaatgcaggaatcattaagcaaaatggaaggctcacagcgttcatttacgaatatggttatcctgcttgcatcttttggaatgctggcattgacgatctggctgtacgacaaaggtgcgatggggttcgagggaatcttaacctgtaccatcgcaatgatgggttctttcggaccggtagtagcattatcaagcctttccaacaacctgaaccagacactggcaagtggtgagcgtgtcctttctcttctggaagagacaccgcttgtggaagaaattccgggtgatgtggaaacttccggtgcagagagcatggaacataaatttacaggagcagaggcagagaacgtaacatttgcttacggtgaggaagttattttggataactattcactgaaattacagccgggtaagatcacagggattcatggtgcgagcggttccggaaaatctacactcttaaaactgctgatgcggttctgggatgtgcaggacggaagtgtatcggtagacggtacagatgtccgcaagattccgaccaagcatttaagagatatggaaagttacgtgacacaggaaacacacctgttccatgattccattgcaaataatattgccatcgcaaagccgggagcatccagagaagagattatggaagccgcaaagaaagcgtctatccatgatttcattatgacacttccaaaaggatatgatacggaagtcggagaactaggtgatacattatctggcggtgagaaacagagaatcggaattgcaagagcatttctccatgatgcaccgatgattctgatggatgagcctacatcaaaccttgactctttaaatgagggaattattttacgatcattaaaagaatcagccagaaagaaaaccgttgtcctggtatcccaccgagtgtccacaatgaacgtggcagatgtggtctacgaaatggagaatggaagaatttcatagctaaaacatttgaaatagcatcactaaaagcggcatggtaacaatagaaaacagtgttgtaacaacattgatcgcactggcatattgagaatcatttccgtatacctgacacatctgggttacagttgaggcagatggagtaatgattgcaagaaatacaatgagcatgattttatctccatctgctgaaaaagcggcgagatggctcaacttaatcagaatcagtgcaaatataggtaatacgattaacctgagaatagagataaaataaacttttttatttgtaaaaatctgtttcagatccataccggcgaaaagcatacctgttacgatcatgcttgctggtccaatcatattaccgacagaacttatcgaatcatttatgatttccggtaaatggatttttgtaaagaaaagcaggattccaataaaaatagaaatcatatttatattgaggacaatctttttccagtcataagaagcctcttggctgataattttcttacagtgagtccatataaaaacgagttgcacgctcatgaatacacatccatataatacccactcttttcctaagataaaagttacgattggtacgatcagattaccagaattagagtaatagatagaggcaatttctacttcgtttaaatgaaaaagtttccctaaaacagagacaacaataagaaggacaatctgtgtgagaacagatgctataaaagccagtagcaatcctctcacagtgtcagaagtataatcaacttgaaaagcgtttataattacacaagggatgaccagatagaggatgattttggataataccttactgtcggtatcctcgacaatacctgtttttacaattaagtatcccataaagatcataagaaaaagctgtgcaatttgtttcatgagaagtatactgatggtcataaaattatctccgtattcttgtaaagtaattcatttaaatcataaataagtatagtacttttatatgaaaagtaaagtgtgtattttaagaaaagacggtgaattccaccgccttttctcattcatctaagtctattaatcaatcccatctgtctcaataataaaccgtacttccccggtctgttcttctaacttaccgccataattatcgtattcagcgtccgcttctttgaccgctttcattcttttggagagattcttcagatcatccccgcctagtttttcaagttcctggattccttctttatcaaagagagtaagtccttcagagagagaagagattccttcggcaagggttgtgtatccttcttttagctctttcccggctgtgcccagtttagtagctccttgggatagcgttgagctgccttcagacaattgactgattccctgttggaaagaggtaagtccctgagtgagctgtaaactgccggcagataaagcagaaagtgagttctgtaaagtctttaatgtctcactgagagaagaaagactctgtgctgcctgagcaaaggaaccggcaccggaagacatctggtcaagcgtagtatggcaggaagcaatcagttccgtcaggctgtttaatgttccttccgtggcggatttcagctgatcgatatctgtggaggaagaagaaagatcaaggttctgatcaattgcagatgcaatcgtatcatttatttcattctttaattgtgacatcttatcgttgacagcatttttagattcttctgataattctgaatctgatgcagtttcagaaacaatctgatcgatcgcagactggacagcatctgtcgcagcggttttggactgttcttttgcgtcctctgtgatagaagatttcagagtgtcccagttaacagatgcgaaggaggatttcgcctctgcaagagaggaatcaacagaatccagctgttggctgagtgatttgatctgtccctgaagtgatgaaagtgtctctgcagacggaagggaaccagaatccgtgtttatctggccagagagagcagaattcagctgttcaagaccattttgaagagaagaagcacctgcaaccagctttccggaattttcattaagtgcggttacaccgttatctaaagcgtctgatccttcggcaagttgtgagacaccgtctacatattgcccaagataactttgataagtagaagcgccgcccagcagctgcgctgctccgtcagcaagtttgccggatgcatctccgagttcctgcaggctgtcagctgcatcctccatatcgtcaaaggaatcctcttccagatcttcaaacagaccggaggaaattacggtcgcggtaaagtccatctcaaaatctgttacatctgcagttacttccactgattctgggatagagatatcttccgtaggttcataatcagtaagcttcagactgtccttaagtcccgggcaggcataaccgacaacgacgctctggttattcatggtaaatattttaccatttgtcacctggatattagaagcagtatcttccggaagaatcatggcggagatcactgcgaatggaaccggagaagtcatctcttcaccatttatggttacattttcttcagtagtatttttataatcaaaacggattccaagtttgccgctttttccagagagatcttccggttgtatagattttccgtccagtgtgtaactgatttttacattcacaggaagttcttctgtagaagtaccttcataatgaatgtcctcccctttgttttcccaggtaatcgttccgtcagaggactgggtgaaggactcatttcctttcgtattttttatgtctttcagagttgagaagtctttgatttcctttgacgttccgttatttttcaagtctgtctggactttgatctcatttatcgttccgcttgcatcagcttttacatataccgtttctgatttgtcagcatctgaagcagtagtagctgttttggtgtcagttgagcatccggtcagacttgtggcagaaaccaggacaagactggcacacagaccaggaactaatttttgtaatagttttcttttcacgagaaatcctcctttcaaatgggacctgcactgttatgcctaacttagaagtttgcaggttactgttcactcccgtgtcaatcactttgctgattgacacggaggatgcatgttttggcttgaatgcatctcgccccatcaccaaaggcgatttaaaatggcgagatgcgttgctggtcgcacatcgtgtgaacagtaatgttcgcaggcagcagatgcaggtacagtcacgattattcaatattttttaatgcctgatccataggtactttcttgattctgcggtattcgatcaatgcaacaagcaggtaagttccgaatcctagcaggaacatttttacatacaggaccggatcaatatacaacggaatccaaccggaaatactgctgatcataattccacggaagagcgctttcataagaactgtttcaatcggaaaactcagaagcaggaaaaccacgaccataatggttgtagaaagcagatacagactgctgatctcccggtcagagtatcctaatatttttgtcatagagattgactgtgcattcttttcgataatgatctttgacaaaagatagatcagaatcataaagagcacaattgaaaatccgtctaacagatacatcatgcttcccatcgaaacattcaattgtctggagattttagacagactgtcgaggtcgatcacagagccgatgtatttctggtcaatatcggatatctcgctgtcagagagataaccactgaagtaatcggaaccaaggtcaaacagttcattgagcgtatcctgtggaagaaaaacggtcagaccaccttcataatcgtagattccttcaatagaaaacgtgtatgtatcatcttcataagcttcctttaaagtgatttcatcaccgatatccagaagatatttatctgcataagcagaagagatgtatgcaggagttgcatcagaagcatcctctttttttgaaacatctttgtcagatacagtttcctgaaaatcaattggaagatagcggctgttatctgcaagtccatagagtaggatttcctcttccttatatttcttatctgttgttttcagtgaataagcgctgaatttctcggcatcaggattatcagtttctacttcatgctgaaaatagagcatatttacaaggctctccagtttatgatcttcatccatagcattgattggtatctgcaaaatgtactggtagttacaaagcaggttatcctgtagaacagtctgataatgatcgagtacagcagggaagagcagaccaaacatcaacagaaggtttgcaaataagattccgaggaacagcagaaggtaattgctgatattctggaaaatcacacgtagtcggaagcgactgaaaaatggaattcttctgctcagtgataatgcatgcttctgttgtcttctctttaagtctctgcggaggaacttcaaaggagaaagtgataatcttctgcaaagtaccgtgtaattgacgagaagcattagcaagatcggaatgatcgtagtaagcagaaatgcttctgcgttccagacggttacatatgttggaagactgtagcttccgtaatacatgccggcgcagatatctttcatgatcgtataaccgagaatgtttccaatcaaagcaccaatcagtgtgacaagaatcggcatcgccatataatgccgaatcagctcattttttgtgtagccactggcaagaagagttccgatgacattcgactcttttgcaatggtgttgctgatcgtaatgccaaagacaaaagccatgatagcaattacgatataaagaaatacaatcatcattgcgcggtcgcttcccatatcatcccgggtaaatgtgattgcctggttgagataacgcggaacgaattcttccagagaaacctccttgttgattgctttcatcagatcatcagatacttctttttcttctttctctgtcgtaggttcattattgtatttccacgcatagcagtattttacaagtggagaatctagtgattcaaatgcttcggacgttacaactccaattccgaatttgacagaatcaaacatggaatcgttgttgttctgaaaaagacagctgtaatccggaagagcaatgaatccggttactttccagctctgtgtaccacttttcagtgtgtctccgatggaaatcttattgttgtcagcatacatacgatcgatggcgatttcatttgccgcttttggaaattctccttccatgagacaggcaagattcacttgatcccggctttcaaagatacgcatcgtactgtcatttgttaaatcttgttccagatagaaattgtcatagatacggataccattttcttctacagactgaatctgcgcatcgttcattttttcagaagtgcggaaatgcccgttctctgtattatatttgttgattccttcattataagctttgatcatgctgccatcggcaacaaggaatccggagacaaaaccaatggttattacaagaagaaggaaaatgacaagatatttaccaaagtctttccggaattctctggggagacgtttgtttaatggatttttcattgtctgttgcctcctttaccagtcaagatcctgggcagtaactttgtggtcattcaggtaattctttcgtaccataccgtcacgaattcggacaacatggtctgccatatccttaatcgcatcattgtgtgttaccattacaactgtattaccgtacttttgattgactgtttcaatcagcttcagtatttctttcgacgttttataatcaagcgcaccggttggctcatcacagagcagaatatccggattctttacaatcgccctgccaatggcagtacgctgttgctgtccaccagagagctgattcggcagcttcttctgatgtgcagaaagaccaagggtatcaagaagttcatctacatctaacgcgtgatcacttaagtaagcaccgacttcaatattttcgcgcacagtaagattgggaatcagattatacatctggaaaacatatccaagatgttttcttcggtattgactaagacgttttacagtcattttttccatcagctcatcttcaattatgatctgaccactgtccgcacggtcaatgccaccgatgatattcaataaagttgactttcccgagccggaaggtccaagaagaacacagaattctcctttttcaatcgatagatcaatgccttttaagacttccacacggctgtcaccctgcccaaaggattttttgatattagttaaggataaaaacatagtctgccccctgttctgtgtgagaattgagtttatcttagttaggaataccctggcttctaacaagatagataaaactcacacatattagaaaagaatagtttatgttagttgtatctaacgaaattatatcacagagatgtaagaaagacattataaaaattgtacaaaatcatgtctttttgatataataatgtgagtggcaaaagaaaaagaacggtgtccgacaccgaggggagaacgtatggaaaaagcaaaaataatagaattaaaagagacaattcttgaagacaacaatgcagatgcacaggtactgcgtcaggaattaaaggcgcagaagacttgtctgatgaatctgatgtccagtccgggcagcggaaagacaagtacgcttctggcattgaaaccttatttcgatggaaagatcaagtggggtgtgatggaagcagatattgattctgatgtggatgcgaatacattgatcgaagcggggatcccatcgattcagctgcataccggaggaatgtgccatctggatgcagatatgacacggcagggaataagagcatttgaaagagacgagctggattttgttgtgcttgagaatatcggtaatctggtttgtccggccgagttcgatacaggggcgaattttaatctgacgattctttcagttccagaaggagatgacaagccggccaagtatccgctgatgtatgaagtgtcagatgtgttggtaataaataaaatcgatgcactacctgtttttgattttcgaaaagactatgttgaggcatgtgcaagaaggctgaacccacagattaagattttttatatctctgcaaagacaggcaagggtgtaaaagaactggctgattatctgctggaacagatagagaaaataaatgcataaacatacagatgaaggggaagaatatgggaaaagtcagagtaattgagatcaaagaaagcgtatttgcggataatgatgctacttcaaaggcaatccgcgagaaaatgagtgcgcagagaacactatttttaaatgttatgtccggaccagggagtgggaaaactacacttctaagtgcattgatcaacagaatgaaagatcagatgagaatcggtgagatggatgtagatattgagaccagtttagatgcacagagagtcgcagatctgacaggagtagaatctattcagatccataactgtggattgtgccatattgatgcagatatggtatcccgtgcattgcttgaatatgatacagagaatctggatctgttaattcttgaaaatatcgggaatctggtgtgcccggcagagtttgacacaggtgctcataagaacgtgatgcttcttagtgtgccggaaggggatgacaaaccgctaaaatatccgctgatgtttcaggtaagtgatctggtgttgatcaataaaatagatactttggagtattttgattttgacttcgaagttgcgaaagaacggattctgaaattaaatccaaatgcagttgttcttccggtcagcgcgaagacgggagaaggaattgagagagtgatggactggattatggaagaaagagaaaagttataattatttcagatataaaaagggcttcccggtgattgaagggaggtccttttgaaagaaccggatcatataagaattccggtttgatttattttaaaatcctttttggattaggtgtcatacgtgagtacaatcaggttcgggctgaagtcgcttggctacgaaagaaatcatactttcgacaacctgacatttattattacagacaggacagagtattgacgatgtaatttcttctgattgagttgatatgttttcctgtgacagaaaaatgaaatcatataaatactcaaaaaattccttgtttgttggttttctgtcagtataggttttgttgaaaatcgtttcgagaatagtcctgttttctgaggtccagattgcattgacagtattgcggatgtttttttctacacaagaccagctagtttcataatgggcagcaatatcgatgtacaaagctttggtaatattggatacacgagtctgatcctcgtttatcaagagcaatccatacacaatgtaatcataaccaagactagttctggcagcaataagtttatcaagtgtagatttgatttcaattacgagtgtattgtggttcatgagagtcccccttaaaaagttatatagataagaaggaagagcctgtttttgatatcatatttattatatacgtattcattgcatttgcaacgttaaacttcaaatggatttaaatttttaagaggaattatcacttgatttttcaagaagaaatgctataattataaagatgtctgtcaaggcagaaaatatcatatggagttgtatcgaagtggtcataacggggcgcactcgaaatgcgttagccctccggggcacgtgggttcgaatcccaccaactccgcttgtatgtttagtgggaaatccttttaaatgtgagggtttggtaaggatgtttttaagatttaggttttgcggtatagtatgttatgtactataccgcttttcctttccacaaaatgacctttgaatggtcgaatactccgatatggttatagataatttcaatttcctgtaaacgtttaccgctgctcttatcaggagcatggacaataattttgtcgataaactcatgcacaatttctggtgtgagttctgtaaggttagtgtacttgcggactactgaaagaaattgctttacatccacagattgtttttcttctttctgtaattctttctctaagaaagtctgttcttcctgcaaagtatgttgttcttcctcatatccttttgaaagtttcataaagcgctcatctgaaagttttccactaatattgtcttcataaatccgttgaaaaattttgtccaactcttgaatacgggaatggatttctgtaagccgttttttcttttgcgacagttctttatttctttgccgcatatccgtgtccatgaccatctgaacaaattcatcttcataatctgatacatagcggataacttctttcaggttttccaacacaatttgttcgactactacattacgaatatagtgcatagtacatgattttgaattgtgccggtaattgctgcatacaaaattatgtttctctgcgctctgtgccatttgcctatgaaatgtcattttgcttccgcaatctgcacagtagagcaaaccagagaacataggcatatcccccattttggtagggcggcgttttccggaacggattttctgtacaatctcaaaggtttccttgtcaatgattgcttcatgggtattctcaaaaatcctccattgttcaggactgttatcaatttttttgcgatttttataagacttaacatgggtcttaaaattcacagtatgtcctaaataatccattctttctaagatatgagataccacagttgcgctccacagatatttgtcaggtggaagaacggttcgtggcttttccccatgctctaacgcataataagtagggcaaagaatttttctttccgttagaatattggcaattcgtgtcggtccataaccattgacacataaacggaagatttcccgaaccacttcggcggcttcttcatctataagccattcctttttattgtcaggattcttcatgtagccataaggagcgtgagaaccgatatgctcgcctgccattcctttagaacgtttgactgcacgaatttttttgctggtgtcctttgcgtaccattcgttgattatgttacgaaatggggtaaattcattatctcccacatgactatccacaccgtcattgacagcaataaaatggacatccatgttcgggaacataatttctgtgtacattcccacctgcaaataatcgcgcccaagtcttgacatatccttgactataacgcgtttgattcttcctgcttcgacctctgcaatcattctttgaaaatccggtctgttgaagtttgtaccagaaaatccatcatctacaaaaaacacataaggctgatacccgtgctcgattgcataacgcttcaggatttttttctggttaataatactgtttgaatcaccctcctgtttatcgtcttgtgaaagccgacagtataatgcggttaattcctctgtttgattccccatcggataaatggaagtgatagtgctgtttgactgctgtaacataagtacctcctatccgacagtcaaacagacaatgcttttacaactttattgtaccgcattttctgtttcctgtctgccttgttttatctcagaattattgtttcaagtcattgcggataagcctttttactttcgttactgcgtcttcctgcgcctgttcttttgagcgagattttaccacatagcaggtgtttcctatctggtattcccgtatcatttcaggggcaggattatttgtattttccataagataacaacctcctgttattttctttgaagcaaaccgaacagctttcgctaaagctcatgggaatctcacccctgcatggttctcatccagccgtaccctttgccagcggtgctacatcatcacacggactaaggctgtacggaagtatcattatcacaatagaaaggtcatggcgacagcttttgcggcaagctgcttatggaacgctggcaggaatcgctatccggtttcatccctcctttggtgggtcacggcgtgccagcccaacggctctctttctatcgaaacgtattcggctgctttatgctgcgttgattagacgctttctttttcaaggaacaatccggctttgtcagcctattaaaatgcactggtgataatgcactttaatagactggcaagctctgtctgggaagcatgagcttgtccatgcttccacaggagagcgttatttctagtttggttccctgatttcaaaagataaaatctttgcaatcagacgtgtttccattcggcggcgtagggtttcatctacaaccatgtgggtgttcccgtattcgtctttcatgggacgcatggaacggctggcaataaaaccgctgtaatggcgtacaatctggttgactgcttcaatgtcaccatccgcagcccttacaatcacaggaaacggaatcatagggtgctttgctgtcatgcttcttcctccataaattttttgataaattccagtccggcgtgtcttcttctctggatggtagaacggttgacttccagaatttttgaaatttctgtatcgtcaaatccgaggaaataatatctcaagataacatcacgtttctttccgtccagattttccaacgcttctgctaacaggctgttttcaacacggacagtaaatccgtccatttcaaaagtatggaagtgggatggataggtgtcttcggaagaaaacaagttgacggtgtaatcgtccatatcacagaacaaggtttcccgtttacactgtctggacaacgctttgagatagtctttacgttcatccttcatagcgactttacagatgtaatcaaactggttctctatggttgtctgaaattcagatggcttcatcattgctcaccccctttccagccttgaaagggagcgagtcgataggaatttctgcttctttcccccttttcgctcttagtcccgacaggacagggggtgcagttgcgttttgagaagaaaaaattaaaacccttttcttccaactaaaaaagcacgcaaacagacgatatttctgcttgtgtgcttcgatagttctttctatgtattctgaaaaaccacattgagggtcagaattttctagtgtaggtagatggctttttttaacggtttaccgaatgtagatatatttaagaaaatattttgcatagcggcttcctcctgtaagccgccggagcctaaaaaaagctgactttaatacaacctccatatattctggaaaaaagaaagacggcggcttttgtcaaaccgtcgtctggaaagatttatgagattttgacgcaagaaaagtgtactgccaaataacggttttttttatttccgtttcggcagcatagttttatctttgatacgcataataggaactgtacaactatacaatacgtttttctatacctgtcactattacaacaggaacagtaaaatgtacagaggtggtgtattatgcgtaaaaaagaagataaatatgatttcagggcgtttgggcttgccataaaagaagcccgtaaaaaacagggattgacccgtgaacaggtgggagcaatgattgagattgacccacgctatttaaccaacattgagaataaagggcagcacccaagtttacaggtgctttacgaccttgtatctctgctgaatgtatcagtggatgagttctttttatcctctgatagtctggcaaaaagcagcagacgaagacagcttgaaagcaaaatagacaatttcacagacgctgaccttgttattatggaaagcgttgcagatggtattgtcaaatctaaggaagtgggggaaatgtaaatcctccacttttgtttataattgcagtgatattagaattgatactctgcaatatttttgaaatcattgttcaacacataatataccttatttttagcaacggaatatataaaagaaactctggttgcccaaagtccttcctgacgtactgacctaagtacatcaaaggcgttggaaatagagaagttttctccatatccttgcagtaaatcctttgccttttcatatctgttatccccagataaaacatatggattagtcaattctggttttaaaatggagtaatttgttattaaggaatatttttctttttccaagcgatacccaatccccggttcaataatgagaacacgcccatttctatccgaaaacatagcctgcatagtagtgtcaggtgcataagtaattttcttttttttcactatttccaatgaatcgtcaaaagagagattgccttttataaagttttctgtcaaatcagctattgtatagcatgattcattaccgcaaaattgtgcattgtcatttccatgtacatacaacaatgtgccaacattcccatttctattgattccgtgaaaagagtggtacttattatcggacatttttatccctataaaaaaacggtctttttcggcaattacagtatgttcccattcagaaaggtcaatatcaaaattgaacccaacaatggtttcttttccattatacacaaatcttgtacacatatttgtatttcctttcgcaaactaatttaaatagtgtaaaaactaattacattagtaattttaaatattataaggctgtttgtcaatacaagagttcattttttctaaccaaattattgacttcattaatttgattacttaaaatgaagtaaatgatgtgtagaaagaggaaaatgaatatgcgagttacaaaagccgaagttataaaaactgcttctgatatggctgatagaaatggacttcataatgtttctttgaaagctattgctgaaaatttagggattcgtaccccctccttatataatcatataggaagtttggatgaacttcttagggagatagcacatagtggtatgcgtactatgaatgaaaaaatgattcgtgcagcaatcggtaagacaggggattcagcattaaaattagtggcagttgaatatcttaattatatgattgaacatcccggtgtttatgaaataattcaatgggctagttggaatggaacagaggaaacagcaatcatttttaatgattatctatctttacttaaaacacttatttgctcatgtggctttaatccagataagaccactgaaattttgaacatggtaacaggtatgcttcatggttatacaactttacaattaagatatgctttttctaatcctgataaagtaagaaaagaattatccgaagcaattgacacactactattgggagctaatcaaaaatataaagactaatgataaattttaaaaagaaatattttataagagaaacgtgcaaatctcaaatgagaaatgcacgtttttctataactatttcacaatcttccagttttccccgttcttttccagcacaaggtcaaactgcgatacctgtgttgtcatggtctggttatccagatatttcactgcaagggaagctgtcacctgatttccgtttcggttataaaccggattcaccagttccgagaaaatatattctttccctacaggtttcagcacaccctcatttacataataggtcagctcctttgcagttgccgtagggtacagcttgaaaaaggtggtgagaaattcgttgatttcctccgtggtgatggaatccaccgtaccgtcactttgtaccgcttttggcgtatagccggattttacgggaacgctggtgatggttggattctggataatcgtcagatttccagagccatccacatagaccgtcacctgataggcggaacggacggttttaccggattctccctctgtgatacgctgttccactgtataggtcacttgataatgctgctccttttcttctgtgatttcccatatctgaaaatcggtcagggcagacgatacggggatgtcctttcggacggtatctacattcagggcttgcagttctccggtgagatacccttttaaagcgtttgtccggctatcaatggaagcggcggactgttcccatgaatagtagacttctgcgaaattctccacaaagttttctatcttgtgggtgtcgaggattgtttccttaatcactttggtttcatggacagtatgaatgtctatcgctgtgaaattcttatagacggcaaacaggaagctcattgccagcagcacccacagggcaattacggtttttttgtgggtattgactttgtaaactttcagtttcttttctttctgctttttctggttatcctcttttctaatctgaatcatatcggttcatcctttcttattgtttgattcgtcgggctccggcaaggtgctgttgccagtaagagcctgtcaggtctgcataaccaatgggatttccggcatggtacatccggttatttcccacatacagccccacatgggtgatgtaggttccagcattgtaggtggagtggaaaaagaccaaatcccctgcttttgcttcggacagggggatgtgctgcgtcacattgtactgttcctgtgctgtccgtggcagggcgattcctgccttgccatagcaccactgcaccagtcccgaacagtcaaaggaagtggagggggaatcgcccccgtacacatacgtccagccctcatactttaaagcttcctctatgatagcctgcaccgtttcatcatcaaattgtgccacggtcaggtattgcgataccaagaggacatagaacatatttccataggaataccgccagcccccgtttttctctacggcaacaggggtggtgtaggtgactttctttccgccggatttgtcccttgagaagctctctgccagttcaaaggtgtattttttcccacgtcctgccacatagtctaggaaaccgccgccgtagttgtaggactgaatcacactgtttaagtcacagccctttgtttctgccgctgcgagcagttccgagaaatatttgcagccctgtttgatggattcctctgtactaagggagttcgggggaagccccagagattccgaggactgcataacgtcttccagcgtgccgccagattccacctgaatgatggcgagcagcacatttaagtattcctctatgccatattcccttgcatacttttccagcataggtttatgggcgaggacttcctgtgatatgctcacgcccccatagataaggttttcgctgcttcctccgtcttcctcatccgagaagacaatcaccaccaaaaggagcagggagaacatcatcacgaacacgccggaacaggcaaagaaaaggtgtcttaacttcatggcttctcccctttcttctgtttggacgccgctgttaccgtttttgtccactcctttctggcggtggtacgccggatggtaaagttggattcttttaccacaggggcagcccgttttctttctggtatcacaggagccgtatcattctggacaggtcttgccggacgggaagcagcaggtgtagtagttgtcttttgtctttcatctggtttgtctggggaagccggagggactatctggcgttctgtccttataggcggtgtctgttcatggtggatggaagccgcttttaccactggaaccgaagcccgttctgcaatagctctcccataaggaacctgtccccgttccctgatggatggggaagcaggctgcacagctggctttcctgtatgagaggtatctgcatgatgttggaaatcttccggctgctttgcagtaacagggcgttcatggacaggagctgcccctttgggtgcttcggaagctgacttttgcggctgttttacctgttccagttccgccctgcgttctgcaatggtctgtctgcggctttctgcctgtgcatttcgttgttccgctctggcagttcgggtctgggtcacgctggaagtaaaatcccttacgccctctgatacctgtgttttcccgtggtaaagggcgtactttgcattgacaggcaaatcctttgcctgctcccgaagctgtccggcagtatcggctatcttatctttggtatctgccgccgcacctaccgcagaaccagcccgtttccatacggattccttttccggtgctgcctgcccgtctggtctgctgtggtctgcctgtgtccgtttggaagaactagatgttgaagcagttctctggtctgagccagcttgttttcctgcgtggtatgcagccgttccagccccaagagccgccacagaacgtcccaacttatgctgtaaacggtgcatatgggcgtgcatgagcatacggggtcttcgcatgatacggctccccatgctttgggaatcgccgctctgtaaggagaacatccccatcaaatcccccagcttgaaatagattccggcaaaagtcactatctgcaagaacgccgtcaggaagaacggatattccccagacaggttgtagagcatggtggaaatgctgaacgctaccgtgataatcagggtgattccggctctggtaaggatggtgttgaacagtttcgtaatggcacgctttgacatcccctcaaaagagggaaccatgctaaggaggaagctcacaggcaggaacatggcgtaaatgataaaaagcacctgtgagaaaatcattatccccgtgagcaggaatacaaaaatggagataccgatattgaacatgaacaggaagaagacggttcccaagcggttaatggtctttgtgatggtaaggttggtgttttccctgtcttcgatttcctccaccacgatttcttccctgtcctgcccgttgttttcatccggactggttgagagtaggctttccacacggtcagccccaatgctttctacatccgagttgccatattgcagcaggagccacggctgcttaacctgaatggaaaacaggctgtcccgtatcaaatccacactgtcttttccttgactttccgagttcggcagcacaatctttgtgccaagggtcaggctggcattactgatgtctgcggaaaattcattgattttcccgatataatctggggcataggcgataaaggcagcggacagcacgaacaccaccacgaagttgacaacagcatggatggcttttgtggtttctcgtttgataagccctgtgtaggcaacgtaaatccctaccaccagaatgagaatcagcaggaacccgacataaaatccctccgaggacaagccgctggtggtaacgcctgccaaggtctgcatatttttcccaatgaaatccgccgtagaggaaatgaagtccagtgagtaggcttcctgaatcagataccctgtggcgttggaaaggtacaggctgattgtccaaataaaatttgtgatggcatacagcccgtacattacctgttttccgataccgtccagccagttccacgggagccagtcccatccgctgtccacataaaaatcaagctggtagttgtccagagggtatttgctgtattcgttggcagcgtccaccgtatcatccaccagtccggcagcgtgggcggctgtgccgaagactgccagcagcaggaggatgagcaggagtgccagaagcaccctgccaatcacttttcctgctatcttccaagacaagcccttttttgtgtgatagggaactgggaattgcggtcggttggaagttctatgtatcaccatcattccacctcttttcttacgggcggtctggtatcaaaggcatggaacaggtcttcaaagataggatggaactgtatcacgcccacacgcccgtacaaatcactgataaggcactgtccgttttccaagtcacggagccgcttctggttgttttcatcttcggaatccaccccgaaaaaggcgagggtcttcttgatttcgttgatgtctgtggaacggaacgcaaacttcaagcccagattgtttttcagcttttcatccagcaaatcgtccgtgttctgggtgacaaagtaaacgcctgcgttcatggcacgtccggcacgaaccagcttcatagagagggtcttgccctgtgccacctgtaagaagctccatgcttcatccaaatccacaatcttaaacacgctgcggtcagtatggatgaagtcgagggcaaaggtgctgattacaatgagcattgccacggaaagcagctccattgtggtgtattcttcaaatgaggtttccttatccggcagcaccaaatccgctacctgaatgatattgagctgcttttcaaggctaatggactgtgtgacatccccatccgaaaagagcaggtgtgcaaagtcatagtccgtaaaggattcgatatggtcggctatgctggtgctgatggcggttccctccgcccgtagttcctcaatgactttgaaaagcccccgttcttcactgtttgtcaccgcacggatggctttccgaagaacagggaacttctccccgtcacggctggaaatgccggttaaaaaggtcaggatgtcgattgccagtgattcagaatcctttgggttctccataatcacatacgggtcaagtaagcccctgttctgttcctccgaagtcaggtttacgatattgatttcatgggcgatttccggcagggtttctttccagcgtccccgttccgctttcgggtcaacaatgagagcctgtgccccaaataatacggaataatagactatcatgttgttgctgaatgattttccaccaccgagggagccgacaaaagcggcagcaagggcgttggtaacggagccttttaccccttgactggcaagggcaggctttaagtacacgtttcttcctgtatcaaggctatacccgatataaataccctccggttcccccaacatctgggttgccccgaagccaagaccagcgaggaagtcgctggtgacatactggatgtaatcgttcagataccgtttgctggcagggagaaattccccatgcagccccagcatatccccaaaggggcgaaccagcttcacgtttaaatcgtcataaaaatctttcacttcattgcagcggcgtttcagttcttccaagtcgggagccgtcacacgcaccacataggacagcttgtacatggattccttgctctggtctaaggtggattccagctcattcacactgtctaaagcgtccaccacgtttgtactggtttcgctgtcattctgccatgcgtgattgtccaaatctttcagctcttttttcttgttccgcaccgtagagagggctttccggtttgtgacaatctccacattcatagaggtatcaatgggaaaggtaaattgctgctgctgatagtaaaagatttccgaggatgggaagtccagttcccccacaatgctgttgatagtaaagtaggcggcataaactgtcccgtcttcctgttcgattttcagataccgctggttttcctctatcagacaacgggtgggtttgatgaggtcatagtatttcaccagcgtttcttcctgaaaccgcttctttggcaggtaatactcataatcttcgtaggcggttccggtctgcccgtataaatgctcaatcagataaccaaaatcgtctttatccagccgccggactttaaagcggcgtgagattttactttccagcagtttttccatcttctgaaaccgccagatttcttcattgctcatggaaacaaaatcccccatgagcttgtggttgacttcatggaggaagtcggaaacagcggtctttgcttccctgcgaaactgtttcatggtgacttcctgctcattgacaagcagcttgaagccgataaaaaagcggtagtccacctgattttcccctatcatggaaatgagggcttcggtctgtgcgtcaatctttgcacaggcaacgtcctttaacttgcccgtcacttcctgtttggagcgttcctgtgctgcccgtatgctggattcggtgctgatttgcagggcgtgaatcttcccgtccctgttctgggcgataagctgccggaaggaatcgtgtacctgatatttctgttcagggcttaaaaaagaatagttgtagggaagcagctcatagtaagcgaagcactccccgtcatggttgaatacaaggttattttcgatatacttaatcggatatgccataaatatcactccttactgccgtgatgggttgtgccggatattccttttccagcttcacgggctttcctgcataggtcagtttcgggcgtaccagatatgccagtacggatttcaggaagccgtaaggcttcttcccgtcaaaggtcttctggcacatgaaccaagtgagggcaaagggtacgccgaagtatttcaaaaatgctccgtcaatgaacgaaagaggagggaggttccctaagagtatcactgcaaacaccgacaccacgaaccacgccatctgtgtgaacgtgatggggaatggcagcttaaaatcattgatggaatagagtaccttttccaccgaccagatactggtatagcttcgtattttcttcatagtgtctgtcctttctaaaagatggggcagcaaaagccgcccctgaaataaaaaagccgcctgtacttccaaaaagagatacagacgggtctatcgtatgatttcatatacgccgtggttcgtgacaacaaaggttccctccaattccatgtcacgcccataggcggcatagtcgatatagttttgtaagtgtgccggaagttccccaagttgtccgctttcttccagatagcagcgagccacatccgccatatcgtcacagccggaatggcagataatatcgtcttcatgctcacagagttcttcgatactgccaaagtaggattgcagctccgatagttcctcctgaatatattccggtaagtcctccaccatctcacacaggcggttgacttcctcaatgggggtatattcgtcaatcgcaaagggcagctcataatcatggatggcgtattcctcatactcatcattcaagccgatacgttccttgacttcctcaaagtccacaggtggcgtgaaccatgcccctaccagttcgccctcattgtatttgcctaagttggcaatgtaaatccgcatttcctccaagttcctccacctccttttagcggtaataaaagataccattgtccgtaaacaggtagtgttcactgttttccagttcccgaccaatggcagcgtagtcgatatggttcaacaggtctggatgtatttctccaaatagctgtacctcctgcaccagataacgggcaagggattccccgtcctgcaccggatagcagcgtatctggtctttgtggtcgataaattccgtaaagctggaaaaccaccgcttttgtaccacatccatttcataatagaggggcgttccctgcatttcctgtatcatccggcaaagggcgttgatttcccagagccttgtgttgccctccaatggaaagggcagctcatagtcttcaatttcgatttcttcctcactctgaaccccaagacgttccctgatttcttcaaaatccacaggacaggaaaaccatgccccagggtattcctcaaaatcctcatggtaaaaccgtgtggtgttcaggatgtagattttcatttcctcaatcagtgtcacctccattctctgtcaggtttttggggagttacgctccccaagcccctagtggacttccgccatgaagcaatcagagcttgctccataacggaagtgtaacaagggtttcctatgcaccgataatcttattgaacagttccagtaagatgtcctttacaccgtctgcattgaagaccagaccgaccgctacgagggaaactaccagaaagccgataagtttggaaaattccctcttaaatccgaggtacagtccaatcaccacgattgccagcagcacaagggactgggcgttggataaaaaccagttgtaaagattctgtccgaaattcataaaagctcctttctttcctgtaagagttcttaggttccaagattgccgccgttaaagcaccacctcctctgcagcggcggcttgctgcttcaggattttttcgtgcttctccgtcagtcttgcatgggtgatgatgtcatggacaatctgggtgtggttcatcttatccagacggagagccagctttaacgtgggggctacctgatgggagagccagtgcagggtgcgttcaaaggaatagggttccggtttggttgtcagtttcaggattcctctgtgttccccgataaaccacgcccattcctcactgatacgccagtcagaacggggcttcgtatcgtccctgtccacgaaccggacatagcggttgatgatttgaaaggctgtccgttctggattgtcatgttctaacaggtcacggatggcgtaaaaggcacgctcatttttcagccggatttcaaagcggttctttacctctgcgtccgcaatgggaatatcatgctttttgtactgctcatagtctttttcgtaaatgcagaagtacacctcactttggagggagccgatatacagggtgttccccatacattctttttccccacgccgtaccagttcgccgctgcggtagcttttaaagctgcggaagaccgagatacattcctcattccggcacttctctgtcagatgggggatgttcaggattcccgttttgtcattgatggcgaggtcaagccgcttcatcacgccgtcctccatgagaacgtccataaaaaactcataccagctccgttcctgtgccagcagatagctttcaaactggcggcagccacgccctttcagttccagcagcacccctttttccagttccggcgataccagaacgaaaatatcacccagatagtaatgctctgtgtaagagtagaagccgtagtcttcatggataaagtaaggcagctttagccgcagcacgtcttccacgatatgtttcacatccgtagtgggaaagcgaatccgcacatagtcaaagagcatttcaaggggattgtctggattgaagcgttccagagcttccgtgatggcttcctgtaatgcttcggatgggtgagccttgcccgtttcaatatcgctcaggtacggacgggtaattccggcagctaaggcaagtttttgttgtgagataccgtaaacttcccgtttctctttgatgtcttgtacccatgtttcttcattcagtgaaaatacctcctgtctaaaaaagcgtatgtcaactttcagagccttgttgacacacgccggatatggggaaaatcccttgtgtaccgtgggattctgccctgttgtttggttgttgcctgtcgatttgtacccctctgttagatacgaggggtttatgctggcgtgccttgcggcacaccagccacagtaggtcagtccgtttctgcggcttttgctccgcacgccgcctgcactccctgcctgctgtctatgagcttttttatttctttgaggaaatcgtgtccttttggcacaaggggcgtataaaattccgagataacgctggttcccacatccacatagccacgcccttttatctgcttgaggaagaaatcctttgtggtttccccaaacatcatcccataacccatttccgacatccgccccagagccacacggaaattgaactggtcacggattccgtcccccagatactttgcgtctggacgctggcaggcgagaatcaggaagaaaccagcctgccgcccaagcataacgatttgttttaatttgttgaggacggcggcattttcctttgtgccgagcatttccataaatgccacatattcatcaaagataaggaaatgtgcaggaagtcccaagtaagcgtagttttcccctgtccggtaattctccatgagcttcatgtcttcactgcgtttcatcatttcctcatagaaacggtcaatacaggtgagcatatcttcctttttgtagtacacatccggcataaccgcctgtaaatccgcaaggtcggcgttcttcgggtctaacacgaacaggatggcgttggtgcggagcagggcttcaatgagggtcaggatgaaataagtctttccgccgccggttcctccggcaatgagcatatgggggagcttgtcatactcccaccagacattttccatgagccggagcctgccatcttttgcctgtacatcctcagtggaaatacggcctccaatggtatcatagagcagggtgtactccacataggaatcctttaattccttatccgtcagctcacagtacaagccgctttccagctttctctccaagtttaagagctgctcctgatatttccccaaggtgatttccacacggatatggagcaagccctgtttcatccggtagtagattttgggaaagtaagtgatggtttctttggaacggctggaagacaagtccttgaaaaaagcgtcttcctttttttgctctgattcataccacttgttttccaacaccatccttgccagcttttggcggtggatgagctgctttacttcatccctgcggtatcgccagaacagaagaactgctgtaaggcacaccagccctgccacgcccatgctgaataacaggtaggggatatttacatcctgtattatctgggagagggacacttcctgccagttggttccggcaatctgccggatatgaaacagcaggacaaccagcaggaagacaggggacagagcggcaagggcagtatggaacacaaggtctttatccgtgggatggatacgttttccacgggggaaaagctgcttcatgggaacaatcctcctttcgctttcttcttatattcctgttattttacagggggagcgtctttcttcggcggctgaggattcatggtagttccttttttcaggacaatatcatccgccttgatgtaccagtccacctctgccccctgaaaggtagccgttgccacggtgtctgccacaggattgatgatttccacctctgcattgtaatcaaattcctttaatggcacgctggcaggaatggaaacctgaatcatacgcccctgtcctctggattttaagtcataggtacgctccttgatttcttctgataccgagccgtcttcattctggaggtgaacctcacggcggagggcagaaaatttcaatgccccgaaagttgcttccttgtcaatcacgattccgtttgctaatctcatagtctgatgtcctccttttccttacgcttttatcatatcatcagcgtgcaaaatgtagttggtaaagccccttgtgccgattttatagccctctgcgatgatacggggattgacgagcttcacacgttcctcaaagtcaaaatgtttctctccggcttcggcagggaggataaccacaatatcatctgccctctgtacgtctgaatacaggttgaagctgcgggagagtaccgtcatgcgtccgttgattcttctctgttctgttttgtcttctccggcgaactccaagttgccgaatgtcttttccatgttggggataacgaattttaattccatatagatgtacctgtcctttctgaaataatatagttggttcgatagcttctgttgatgttccatccgacaacggaggagagcgatttttctctgtcatacaaaaccgcctttcttattcatgtatggtttctgctattcctgccatgatgtaatcagcacacggcagggcgattgcgtttccaagtgctttgcaccgtgcattatcactaatgggctgtcctaaatttccatatgctgtccacccctccggtaatcccatcaggcgttcacactcaacaggtgtcaaatttcggagaactccgtctttttcttccccctcataccagaatgaaatcatattgactgcttttgctagtaaagttggaaaaggttcatctggccgtccgaaacttgcgaggaaagcagactggtttcttgattttgcagcactccgcatacgccgttcctgaaaggggcggatgacgggtattttcccccttgttttatcaagagatattcgactggctccggcggcgggcagcccgtagtctgtgcaaggcggaggaatcgggaacatatcacggggcttaaatagtatttctgcggaacgctgtcctctaaaatctgccacaaggaagattctctttcttcgctgaacaagccggggctttccccaatactgggcatccatgagccgccagcacaggtcagtctttccccctcgcaccataccggcgttagcccatcctccagtaggaggcattgaaatttcggtatcggaaaatgattgcagtacggctctaaaatccatccggtcatttgaagaaaacgctcccatgacgttttcccaaacagcgataactggatataacccatttgtagcacacctcatttcttctataattctgatagcctgaaaaaataggcctgatttgcttccggccagcccctcacgctttccgattttagaaaggttctggcagggagaaccgaatgtaataatgtgaacaggagggatgttccctccatgtatctttgtaatatcccctaaatgttccatgtctgggaagtggcgttttgttatggctattggggatttttcaatctcgcttgcccaaacgggaatgattccattacgggaagccgcaagagggaacacgccgattccgtcaaacaggcttcctaatttaagggcgcacatagaccgcctttcgttttactttttcatgtgttatttccatttttctgctcctttccagacaataaaaaaacaccatcaatggaagtccattcaatggcgtttgttgttgtctgctaatgtttcaaggtaaagcagaaagctcaatagaaaaagacgcaaatctcaaaaatgcgtctttttctatcttcatattcattttttataaaagcaccgtctgcctgctgtctgcaaagccttgattttactggttttctactaccatccttatcaaagccttgctaaacatgggttttccatttttttattgttatcaatgcagttatttgacgagatataaaatactagctgtaacaatagtttacttgtatttctttaatcctttttatatataagaatagggcgtagcctgtatgccacacccttaattcttattgttcattcagtatgtatttaactgctttctctgctttgctacttgctgatacgatgaacttgttatcgttctttaacgcttgtaaccagttctgtatatatgcacctgagttcctaaagctcttttctgtctcaatgcctaacatattgacaagtgcagcacttccaagctctgcaacgagttcttcttttgaataggttttacttccaaaatgtgcgcttgctcctgtttccaatctgccaagcctgttcttgtgtcctgtactgtgaatcatttcatgaaacagtgtagaataaaattcttcaatgttttgatactgttctttacaaggtacttcgatataatcaaaagtcggtgtgtaaaaagctttattcgttactgtctcgaaaatctttaaatgttctctgttcatgtattcgtttttgatgttttcggcctcttcaatcgattcaagatctgaaattttcaattgttctttcggttcaactccatcaacctgtgaaatgtgaaagacgttgtaatatcttaataatggtaactgcttgattgttttttctccgtcttcgtttatttcttcgatttgttgaatcttccagaatgtaacaatttccgatttctcaccttttctaatcttaccgcctaagccactccattgtttaaatgttgcgtactcgccaccatgtttaagaagtaactgattaagtaatgaataaggcctattacttattctgttataagctccgctgtgtgttccgctccaaggtttctgccatgggataacaccattttctaactgttcaataattcgttctgtaatcatttcatatactgatttcttcatatctttgaacctcctctgtatttatttgttaatattattatatgttgaataatctggtctctgtgtccctactgtccggagttaggaaaccgctaatccgtctttgagaaaatcgtcattccggtgtaggaaatctttacttgatgaaaatgatacggatgctgttcttgcggaaaaactttttccttctgcaaaaaaagttacatttgtcaaacagatgccagattatgattacatccgaaaggaacttctccgcaatggagttacaaaaagctcctatggacagaatacatggagcattgccgtactaatggagaggaacctcttatgtattctcaaagcctacatctttgtcggtgtgatgatatatagtcagtatacatatgttagaatcctttctagatatgaagcaaaaatcatgggttaatgatcatgtccatatgtacgaatttttcagtggcgtggcgaagattctcgtaccagataactgcaaaactgcggttgttcacaatggtggatggaaacagtaattgcaaatgtagatgtgaaatgtataaaggatgcgcctataaagacgagaaggtgaataacacaaaaatatggcatcaattgaacaacgaaaatgatttatattataagaatttatatccagttacggaaaaacaatataatcgattgacggaattgcaggaagaatctgcctttccgctgtctgaggatcttattatgcaggtaataaatgcagtggaatacaagcaagatggatggaatccggcacattacaaaagaggaatgtgtgggataggatatactgaagtcgggaaataaggagtattcccctgaaacatgtgtgttgattgaacactatattaatacaatatttgagcgtcacgcatcggacaacatatacgaaaatgaagatggaaaatcctttatttaatgcgttagccctccggggcacgtgggttcgaatcccaccaacttcgtaaaaaacaaagaaaaatgccggaacatatctcaaaaagagtgtgtttcggcatttttagtccattaagaatgagaaacaatatgcttcttaattgcattgaaactttcctcgctgatcacatgctccatacgacaagcatcatcagcggcaatctgtggatcaactccgagtctctcaagccaggaagagagaagagtgtgacgctcatatatcatgtcagcaatcgcctgtccggattctgttaatgtaatatagccctcacgagatacaataatgtgttcgctttctctgagctttttcattgccacactgacacttgatttcttaaagttaagctctgttgcaatgtcgacggcacgtacgacaggaagctttttgcttaacatgaggattgtctccagataattttcagatgattcatttacatgcataggtaatggcctcctctatataaattagaatttatctgtatcactatttacagtgaattttcatgtctttgcttagtatatcataatttattccctacagcaaataatttgccagacaaattttgattccccaattccgatttatacggaacagaaaaattaaaaaaatataaattagtcattgacaactaatagagattagcatatactaacttacgaacaggagagaaaatgaaaaaaattatcaatctcaactgtttttaataatctatatcaaatgagaatggattctaatatcatttaagaaagaagcgtgagattatgccacttacaatggccaacattggcgaaaccaatacaattaagagagtaagcggaaatgatgagacaaagcgttttcttgcgaatcttggatttgtgcccggagcagaagtggtcgtgctatctgcaattggcggtaacgttattgttaatattaaagattcgagagtagcagtaaatgctgatatggcgcgccatattatgatctgattgagacgctgaaaaagtgatgagtaaagtaaggaaggagtatgtgttatgactttaggtgatgcaaaagtaggaactactgttgtagttacaaaaatcgaaggagacagtgcttacaaacgccgtattatggatatgggaataacaaaaggaagtgaactttttatcagaaaagttgcaccacttggtgacccggttgaaattacagttcgtggatacgagcttactgtcagaaaggcagatgcacagtgtgtagaggttaaataagcctacagatacaaagaacctgatgagagattctagaatttaaggaggtaaagagagtaatggcaatcacaattgcacttgcaggaaacccgaactgcggtaagacaacactgtttaatgctcttacaggagcaaaccagtatgttggaaactggccgggagtaacggtagagaaaaaagaaggtaagatcaagaataagaaatacaaaaaggaagacgttacagtaactgaccttccgggaatttattccctttctccatatacacttgaggaggttgtcagccgtgattacgttctgaatgagaatccggatgtaatcgttgaccttgttgacgcaactaacatcgaacgtaacctgtatcttacaacacagcttgttgagacaggagtaccggttgtaatcgcattgaacatgtgcgatcttctcgctaagagaggcattaagattgatgtaaaacgtctttccatgctgatcggatgcccaattgttgagatttcagcattgaagcagaaaggtctggatgaactgatcgatgaagcaatcaaagttgcaaagcagaaggaagtaaaacttcctagtgagatctttgcaaaagatatagaagctgctgtagaaagcgtaaaggaaatccttcctgatacaattacagaagataaaaaaagatggtacgctgtaaagttccttgaaaatgacagcaaagttgtagatcagataaagctctcaggtgcagcaaaagcagttgttgaagatgaaagagcaaaactggaaaagaaacatgatgacgatatggaaagtattgtaactgacggacgttatcagtttattcagaaaattgtaggaactactgttaaaaaagcaaaagaaaaactgacaacatcggataaaattgaccgtatcgttacaaaccgtatcctcggtattccgattttcattgcagttatgtggcttgtatattacatatctgtcacaacagtaggtacatttgtaacagactggacaaatgatacattcgttggagccattcaggaggcagttggaggattccttacaaatgtcggagcaagtgatctgatcaacggacttgtagtggatggtatcatcggcggacttggagcagtacttggattcgttccacagatggcaatcctgttccttttcctgtctattcttgaagactgtggatacatggtacgtatcgcattcgtcatggaccgtgtgttcagacatttcggactttcaggtaagagctttattccgcttctgatttcttcaggatgtggaatccctggaatcatggcttccaagacaattgagcaggacaacgacagacgtcttacaatcatgacagcaacatttatcccatgtggagcaaaacttccggttattgctatgatgggtggagttattgccggtgaagtagcaggatatcaggagagctccttcattgcaccattgatgtactttgtaggaatcgttgcagtacttgtttctgcaatcatcctgaagaagacaaaacctttctcaggaaaaccggctccgttcgtaatggagcttccacagtaccatattccacaggctaagacagttctccttcatgtttgggagagactgaaaggattcatcatcaaagccggaacaatcctgttccttgcatgcgtagtaatgtggttccttggaggattcggatttacagcagatggattcggacttgtagaagacagcgcagacagcttaatggcagcaatcggcggagtgatcgctccactgttcgcaccacttggatttggtgagtggcagcctgtagcagcatctatctcaggatttacagcgaaagaagcaatcgtttctacaatgggagttcttgcaaatgtgtccggagatacagaagacgcagtgacagtagcgcagggagttgcttcctggttcccgtcaacaattgcagcatttacattccttctgttcaacctgcttgactcaccttgtcttgcagcaatcgcgacaatggcacagcagatgcagtccagaaaatggttctggtttgcaatcctgttccagaatgtatttgcttatgttgtttgcctgatcgtataccaggtaggatctttcgtaacaggcggagcatttggcgtaggtacagcagtaggatttatcttattgatcttccttctgttcatgctcttcagaccagatccgtacaaagatcagaaagtatactcaaaacgttctgtgcaggcagcgtaatatgagagaaacaagaacgtgaaagcgttcttgaaaaatagagctggatgcaggaaatgtatccggctctctgttataataagagaaaaaagaggtgttgatgacaatgatagcaaatattgtaataataactttaattatcggatattgtatttttctcatttataaaggatataagaaccataaagaagggaaacatgtcggatgcgccggatgcagtggcaactgtggaagctgcggcggatgcagtgcggcagctggaaaatctcaatatacaaagaaaaagtaaaaggtgattagaatgggaaattcaacaggttctatgttttacgcatttggtgcatttcttttgatttaccttgttggtgtatccatctatcagatttatctgtggatcaagaaatggcgagaaaacagagaagagaaagaagactaaaagagggatcacaaaatggcagatattatcattatattaattgtaatcatcttgcttgggttggctctgaaaggatcaatcaaacattttaaaggagaaggtccttgttgcggaggcggttcaggaagcaacaagaaagcaaaaacaaagtttttagacggtccggtgattggcagaaaaacgttgaagatttcaggaatgcactgcgagcattgtgcgaataccgtaacaaatgcattgaatggattggacggtattactgcaaaagtgaatttaaaggacaatagtgcagaagtttcctacgacagagaaattgatctgacagatttgaaaaatgcagtaaaaaaagcagggtatgaggtcacttctatctcataagagtaaaactctgtgagagatggcaaagcaactgatacagcgaaaaccaggaagcaggaggtgtaccgtgagtaagaaagaacagattattgaaaaactaaaagaaaacgggtgccggatcacaaaacagcgtaaaatgttgattgatattattttagaaaatgaatgctcaagctgtaaagaaatcttttataaggcatcccaggcagatgaaaagatcggtgtggcaactgtttacagaatgatcaatgcattagaagaaatcggagcaatcaacagaaaaaatatgtataaagttgattgtgcgcaggattgtccggaagatgggggatgtatcatcatgctggatgatgatacgatttttaaactcacagaaacaggatggaacaaggtgatccgcgaaggactgaaacattgcggttatgtaaaagatcaaaaagtaacatcaattaaattaccggataataaacgataaaatttatcgacaaatgcagttagaattgactatccgcatagtgagttgatatgatgtataaaaattttaggaggttttatacaatgtgggatatatttaaattgaaaaaagcaggaatctttgcaggaggtgttcttttcggaacagcgggagtgaaaattcttgcaagtgatgatgcaaagaaagtttacacaaactgtacagcagcagttttaagagcaaaagactgtgtgatgaagacagcaacaactgttcaggagaatgcagaagatatccttgcagaggctcagcagatcaatgagtcacgtgcagcaaaagaggctgaggctgtctacgaagcagaagaagcagaagagacagaaactcaggaagagaatacaggtgcgcaggatttcaaagaggaagaagtttaaatctctatgaaatttattgtaaagcatgagatcaatggccgccttcgtatccatgttgtccagaaaaggatgacatatacggaggcggatactctatcctggtttctctccaatcagaagaatgtaacagatgtaaaagtatatgaacgcaccgcagatgctgtgatctgttatgttggagataaggaagaggtcttgaatttattgaagcagttttcttatgaaaatgcaattcttccggaacatgttgctgcaggttctggaagagagctgaatgctgtttatcaggaaaagctggtcatgaagacagttcttcattatggaagtaagttattccttccaatgccgatccgtgcagtgattacatctgtaaaatcagtgaaatatatctggcacggaatccgttgcctgatgcatggtaagatagaggttccggttctggatgctacagcaatcagcgtttccgtattccgtagagattatgctacagctggatctgtcatgttcctgcttggaattggtgagatcatagaagaatggacgcataaaaagtctgtcggagatcttgcgcgtagtatgtcactgaatgtcaataaagtgtggctgaagagaaatgaacaggagattcttgtaaaatcatcagatattgagccgggagaccatgttgtgatccgtatgggaaatgtgatcccgtttgatggggaagtagttactggtgaaggaatgatcaatcaggcatctcttacaggtgagtcacttcctgtaagaagaagtgtaggacagtctgttttcgccggaacagttctcgaagaaggtgagattgaagttcttgtcaaagcggtatcaggctctacgagatttgagaagattgtgacaatgatcgaggattctgaaaaactgaagtcttctgtagaaggtaaggcagaacatcttgcagatagacttgttccatatacattactggggacaggtgcagtctggctcctgacaagaaatattacgaagacactgtctgttctgatggtagatttctcctgtgcattgaagcttgcgatgccgatcactgtactttcggcaatccgtgaggcaggcgagaacaatatcacagtaaagggtggtaagttcttagaggccgtggccgatgcagatacaatcgttttcgataagacaggaacattgacaaaggcaacgccgacagtgaaagagattgttgctttcagtgaatactcagaaaatgatctgctttgtattgcagcatgtctggaagaacattttcctcattctatggcaaaggccgttgtagatgcagcgaaagaaaggcatttgtctcatgaagaaatgcactcaaaggtagaatatgttgtggcacatggaatctcttcctctattgatgataaaaaggttctgatcggaagcagtcatttcatttttgaagatgaaggatgtacgattccatccgaatatcaggatagatacgattcattaaaaccagaatactctcatctgtatctggcaatcgagaaacaacttgttgcagttatctgcattgaagacccacttcgtgaagaggcaacagaaatggttcgtgatctgaagaaagccggtatccgtaaagttgttatgatgacaggtgacagtgaacgtacagcggcggcaattgcgaaacgcgttggcgttgatgaatattatgctgaggttcttccggaagataaagcgaatttcgttgagaaagaaaaagcagaaggaagaaaagtaattatgatcggtgatgggatcaatgattcacctgctctttcagcagcggatgcggggattgcgatcagtgacggcgcagagattgcaagagagattgcagatatcacgattgcggcagatgacctgcgcgaagttgtgacgctgaaacttctggcaaatgccatgatgaagcggatacataagaattatagaaatatcgtcggaatcaattcaggactgattttgcttggcgtgacaggaattgtccagccgacagtatctgcacttttgcacaatgcgtctacattgatgataagccttggaagtatgaagaatctgctggatgaaaataaaagaacagaacttgagtagttactgtgaacagcaatcttgagtgaaacaacataaaataaaaaaggcaagaaaaagaactgccgggattaacttttgtaggggtttgtcccggtagttcttttttatatgttaggaaagttctttcctaacatataaaaaacgctccgctcaggatgcgcactgcggcgtacaaggtaggtgtcgcaagcgaccgccgcaggcgcaagaaggtgccaaggcacattctttattctaatgagaaacattatcagtaaatgatattgatattacgttttcgttatagtatagtaaatacatgggttagatacaactaacgaacaaggaagatatgtggaaatgaattcataaaacatacaggaaagtaataagtaaagcaatagataatcagatcttaatttcaggaggttcagtatgagtgtagtaatcattggaggacatgacagaatggtatgtcagtataagaaagtctgtaaacagtttaattgtaaggcgaagatcttcacccagatgtcagcaagcttaagcaaacagattggaagtcctgatctgatcgttcttttcacaaacacagtatcccataaaatggttcgctgtgcggtagaagaggccggcagatgcaatgcggatgtgattcgctgtcatacgagttccaagaatgcgttagaagagattctggagaatgtttgtgcataataaatattgctgaattattgaaactatgagaatagaaaagtcccttcagaagaaataaacttctgaaagggactttttctgtatcatgctgccaattacgcagattatcaatctgaacaggatcacagcaccaatttctataactgaatatttttaaagagatctccaaggtttgttccgatatcttccgctttcgggatcacaaccttttcagctttctcttcagccttctctttgtcttcttcgagagctttcatgctaaggctgatcttgccatctttgataccgatgactttcacttcaacttcatcgccaactgtgagaacatcagaaggcatttttacacgcttctgggagatctgtgaaacgtgaaccagaccggaaagtccgttctccaactttacaaatgctccatagttctgaagtgtttctacagttcctttcagaacagttccaactttcatacttgcaatttgtgcatcacgtgctgctttttccttttccttcagaagctcacgtgcagaaaggacaagacgattattcgcctggtcaacatcaatcacctgtacttcgatatctttgagaagataatcttccagattctcgatataggaaagggacagcttagaagccggaacgaatccgcgaagtccttctaccattacaattacgccaccgttgacaacaccttcaattttaacaggaagaacagttttcttatccatataatcctggactctgttccatggattcgcatcatcgaaatgatcttcatagtctgccattgtttctgttacttcatttgtctgtaattctttcatttcttcgctcattaaaagcacctcattttctttttctcgttattcaaaagtataacatatgtatgagaaaaaatacaacaaaagagccaaaatccgtgaagaaaatgaaaaatgcggttggattaatagaaaaaaaatgttactctacttattgaatagtaaattgtcaggtttaatacttaatgaagaagctgttcatgtaagatgacagaatacagagataaattgatgtgagtgtaaaagtaaataagagataaattagagaaggagagatagaaaaatggctgagaataaaaaggtgtatgttgtaggtcataagaatccggatacagattctatttgtacagcaattgcttatgcaaatcttaagacaaagattaccggagaaacgtatgagcctcgtcgtgcagggcagcttaacgaggagacacaatatgtactggaacactttggcgtaaaagttccgttattactttctgatcttagagaacagattaaaaatgtggaattaaaagaaagtcaggaaattcagggaagcctctcaatccgtacagcatgggaaaagatgtcagagatgaatactcatacgattccgatcacacgtaatggtgtgctggaaggtgtgatcacaaaaggtgatattgcgaaatcctatatggaagtctatgataacacaatgcttgcgaaggcaagaacacagtaccgtaatattgcagcggcagtagaaggtgaaattgtaacaggaaatgaacatggttatttttataaaggaaaagtaactgttgcagcatcaagcaaagagttgatgacaagctttatcgagaaagatgatcttgttatcattggggatcgaattgatgcacagcagtgtgcagttgatctggatgcaagctgtatggtagtctgccagaatgatccgatctcagaagatattctgcgtcaggcagaggcaaaagaaattgtcgttatctggacacagcatgatacatttacggcagcgcagcatattagccagagtattccggtaagatctttcatgacaaaggatcaactcgtaacattccgcaagaatgattatgtagatgatgtgaaagaagtgatggcacgcaagcgtttccgcgacttccctgttgtagataaagatggaaagttcttaggtcttgtttccagacgaagacttctcaatgttagcaagaaacaggtgatccttgtcgatcataatgagaagaaccaggcagtagacggagtggaagaggcagatgtccaggagattattgatcaccacagattgagcagtatcgagacgatcggacctgtatttttcagaaatcagccggttggatgtacagcaacaattgtatctcagatgtacgaggaaaatggtgtcgaaatagatccggtgaatgcaggacttctttgttccgcgatcatttccgatacattgatgttccgttccccaacttgtacaccacttgatgaaagcacagcgaaaaggcttgcagagattgcagggatcaatatagagaaacttgcgcaggcgatgttcaaggcaggaagcaacctcaaaggaaagacagccgaggagattctcttccttgattttaaacagtttacagtgaatgatacggtatttggtgttggtcaggtgaattcaatgagcgaagaagagcttgaagagattaaggcaacagtacttccggagatggaaaagacaagacaaaatcacagtctggatatgattttctttatgctgacaaatattattacagagtcttctgaactgatctgcagtggtaatgaagcaagagaaaagattatcggagcttatgatttggaagataatgcacagaaactgatgctcaaaggtgtcgtatcacgtaagaaacagctcgttccggcacttgtatcagcactgcagcagtaagaagcccaagatattttcaaatagaaagtcagaaccgtctccgtaacaggggacggttttcaggaggaaagagaaatggcgaaacaggtatggaaagccggtaatatggtctacccgcttccggcagttatggtaagtacggcagataaagaaggaaatacgaacatttttaccgttgcatggacaggaactgtatgtacaaatccggcgatggtatacatttccgtaagaccggaaagatattcgtatcatatgattgaagagagcggagagtttgtgatcaatctgacaaccgaacagctcgcctatgcgactgattactgtggtgtgcgctccggccgggatgtggataaatggaaagagtgtcatttaactgcgaaaaaggcagagaagcttacttacgcaccggtcattgaagaagcaccggtcaatattgaatgtgtagtgacaaaaattgagaaacttggaagtcaccatatgtttcttgcagaagtgaaagcggttcaggtggacgagtcctatatggatgagaagggcaaattcgaactcaataagacaggtcttctggcatattcccatggagaatatcttggacttggaaaaaagattggaacgtttggatacagcgtgagaaaaaagaagaccgttgacaaacgaactgctaagaagatcacaacaaaaaatgaatcaaggagcaagaaatctccagagaaaagaactgtgaataaaaatgcaacattcagaaagaaaggaaaagctaagaaatgatttcatttgaaaatgactattcagaaggcgcacatgaggaaatcctgcgcagactggcagaagtaaataaagaaggaattacaggatacggaaatgattcatattgtgaatccgcaaaggaaaaaatccgtcaggcatgtaaatgcccggaggcagacatttacttccttgtgggaggaacacagacaaatcagacagtaattgattccgtgctccagagctatgaaggcgttatcgcggctgagacaggtcatgttgcatcacacgaggcgggtgcgattgaagcatccggtcataaagtactgacccttccgcagctggaaggaaagattcagcccaaagatgtggcagattatttgaatcagttttatagtgatgggaatcatgaacacatggttttcccggggatggtctacatctctcacccaacagagtatggcacactgtatacacgtggcgagctcgcagagctttctgatatctgtcagcagtaccatattccactgtatctcgatggagcacgtcttggatatggtcttgcagtagaagatacagatgtgacaatggaagatattgcagaatactgtgacattttctatattggtggaacaaaggtaggtgccttctgtggagaggcagttgtatttacaaaagaaaatgcaccgagacattttgtgacactgatcaaacagcacggagcactgcttgccaaaggatggttccttggtgttcagtttgatacgttatttacagatgatctgtatatgaaaatcagtaaaaatgcgatcgaaacagctgcgagactaaaagaaatcctgaaagaaaaaggatatgacttctatattgattctccgacgaaccagatctttgttgagatggaagacgagaagctgaaagaacttgagaagaatgtcagggtcagcttctgggagaagacggatgagaagcatacagtagtcagatttgccactagctgggcaacggatatggagaaggttgagaagctgagggagtatttataaaaaagtaagaatataaataatagcaaatacagataatatatagaaacccataaaatgagaatcattatcatgtagaaatattgcgttttgcaaagaaacttgatagaatacatatggttagagaaaactaactgtgtgaataaatcatgtatactcctttgtctgtaatacctgaacacagacgagggagtcctcagaaaggatggacaactatgaattatctggaaattgaaaaagtaattggaagagaaattatcgactcacgcggaaatccaacggttgaggcagaagtgcatcttgtagatggaactgtagcaagaggtgcagctccaagtggtgcttctacaggagaatttgaggcgcttgaacttcgagatggagacaagtcaaaattcggtggaaaaggtgtttcccgtgcagtagaaaatattaatacaacaatcaacagtgcattggttggaatggatgcaggagatacttatgcgattgatcaggcaatgatccaggcagatggaacaaaagataaatcaaatcttggcgcaaatgcaattcttgcggtttcaatcgcatgtgcaagagcggcagcagatgcacttgagattccgttgtaccgttttcttgggggagtgaatgggaacagacttcctgttccaatgatgaacattgtaaatggcgggtgtcatgcactttcttccggactggatgtgcaggagttcatgatcatgccggttggagcaccgtcttttaaagaatgcatccgctggtgtacagaggtattccatgcacttgcaggaatcttgaaagacagaggacttgcaacatctgtaggtgatgagggtggatttgccccggcactgaaatcagacgaagaagcaatcgagacaattcttgaggctgtgaagaaggccggatatgagcctggaaaagacttcaagatcgcgatggatgcggcatcttcagaatggaagacagggacgattggagagtataaacttccaaaggcaggaacagtctatacttcagaacagctcattgaccactggaagaaactggtagagaaatatccgatcatctcaatcgaagatgcacttgatgaggaagactgggaaggctggaaaaagctgacagcagagctgggagataaagtccagctggttggagatgatctttttgtcacaaacacagagagactggcgaaaggaattaagcttggatgcggaaattctattctgatcaaactgaatcagattggatctgtatctgagactcttgaagcaatcaagatggcacacaaagcaggttacacagcaatttcttcccaccgttccggtgagacagaggacacaacgattgcagatcttgcagtagcactgaatacctgccagatcaagaccggagcgccgagccgttcggagcgtgtagcgaaatataatcagttactccgcatcgaagaagaacttggaacaagcgcagtatatccggggaatgacgcatttaatgtgaaataacatcagtaaaataacctgacagtcaggaaaatccatgcattttatgatctcagtgggatgaaatgcatggatttttgtgtatatatttctttgattttcatctagatttttttatctatatgtcatacaatagaaatgtaattgccatcaggcaacataatatttaaaaatatttggaggatttcattatgaagaaaccggttctggtcattatggcagcaggaatgggaagcagatatggcgggctgaagcagattgacccggtagatcaggaaggacatattattatggatttctcgatctttgatgcaaaacgcgcaggatttgagaaagtcgtatttattattaagaaagaaaatgaagcagattttaaagaggctgttggaaagagaattgagaagatcatggatgtagcgtatgtattccaggatctgaacaatctcccggaaggttatgaagttccagaaggacgtgtaaagccttggggaacagcacatgctgttttaagtgcgatcgatgaggtggatggaccatttgcagtaatcaacgcggacgattattacggacgtcatgcatttgagacaatctatgaattccttacaacacatgaagatgatgataagtaccgttatacaatggtaggttatcgtctgaagaatacagttacagataacggacatgttgctcgtggcgtatgtgaactcaatgaggcgaaagagctggttggaatcacagagcgtacaaagatcgagaagcgtgacggtggaatcgctttctcagaagacgacggagagacgtggacaactatcgacggagatactcttgtatccatgaatatgtggggattcacaagaagtattttagatgagatcaaagcaggattcccggcattccttgagaaaggtattaaggagaatccaatgaaatgtgagtacttcttgccatccgtagtcagtgaccttctggcagagggcagagcaaccgtaagagtgcttgaatccgaagataaatggtatggagttacatacaaagaggacaagccggttgtagttgcagcggtacaggctttgaaagatgaaggtctttatccacagaaattgtgggattagattatgtgttgtcagttacagaatttgtgaatcataatgattatgcaacatttttaccataagaggaactattcgtataaagatttttgtggtggatgtgttataatcaaagacaacaaagcaaagataagcaagctgctgaacacagttactgtgaggagcagcaatttgagcaataaagctcagaggaggaattttaaaatggcaattttagtaacaggaggcgccggatttatcggaagccacacgtgtgtagaacttttaaatgcaggatatgatgttgtaatcgcagataacctttacaatgcatctgagaaggcagtagacagagtaaagcagatcacaggaaaagatcttaagttctataaagcagacatccgcgacaaagaagcaatgaacgagatctttgagaaagaagagatcgagtcggttattcatttcgcaggactcaaggcagtaggtgaatcagttgttaaaccactcgaatactacgagaataacattgcaggaactttagttctctgtgatgtaatgagaaatcacggcgtgaagaatatcatcttcagttcttctgcaacagtatatggtgatccggcatttatcccgatcacagaagagtgcccaaagggaacatgtacaaacccatacggatggacaaaatggatgctggagcagatcctgacagatcttcatacagcagatccggagtggaacgtcgtacttcttcgttacttcaatccaatcggagctcatgagagcggactgatcggagaagatccgaagggaatcccgaataacttgattccatacattacacaggttgcaatcggtaaacttgagtgtctcggtgtgtttggagatgattatgatacacctgacggaacaggtgtccgcgattacatccacgtagttgatctcgcagtgggacatgtccgcgcagtagaaaaactgaaagagaaagcaggagtttccgtatataatcttggaacaggaaacggatattccgtacttgacatggtgaaagcattttccaaagcttgtggaaaagagattccttatcagattaaaccacgtcgtgcaggagacattgctacatgttactgtgatgcttccaaggcaaaggaagaactgcactgggtagctgagagagatctgaacaagatgtgtgaagattcctggagatggcagagcatgaatccaaacggatatgaggattaagtttgattaatcatttataatgtgaaataaaaagttgttgatgagcaggggcgaacgatgatagtgcggtttcctgtgccatcaacaacttttttgtatcatttgtaaattatgttgaccaaccgcgaacagcaacacagctcttgcaaccaacagtccatctgtattatactaatagaacacgattaaattcagaagaaattggagatagaaaaatgaagcgcgaagtagatcttaatgaaatttcagacggacgtctgtattcctccggagatatggttaaggtggactgtcatgattgtgaaggctgctctgcatgctgccagggaatgggaaattccatcatattggatccaatggatctgtggagattgcaactcggaaaaaaagagaattttgatacactgtttgcaaactatctggaattgaatgtagttgacgggatggtacttcctaatttaaagatggcaggagaggaagaagcctgtctgttcttgaaagatggaagatgctctattcatggatatagaccgggaatctgccgtttgttccctcttggacgtatttatgaggagaatggattcaagtattttatccaggtgcatgagtgtaagaagcaggaacgtggtaaagtgaagattaagaagtggcttggaattgcagatcagaagagatacgaagatttcgtgtggagatggcatacatttcttaagaactgtgaagaaggaatgaaagaacttgatgagcagaacgcgaaagtactgacggttgtggttctccgcaacttttatcaaatgccttatcaggcagaggaagaagcacagttttatccggaatttgaagaaagactggaaagactgaatgcaatgtttggattttagaagtgaaagttaacaacaggtgaaaggcagcagtagatggaaagcaacagtagaaaaacacagatattaaaagaaatttttggatacgattctttccgtaaaggacaggaggagattgtagatcagattttgaatggaagagatgtgttggcaatcatgccgactggagcgggaaagtcactttgttatcaggttccggcacttctgatgtctgggatcacgatcgtagtatcaccgctgatttcattgatgatcgatcaggtgaaggcactgaatgaagcaggagttcatgcagcgtatattaacagtgcactgacagagcggcagattacaaaagcattagaactggcagcggcaggcagatataagatgatctatgtcgctccggaacgcttgttgacaccacggtttctggactttgcatgtcatacagaactttctatggtgacaatcgatgaggctcactgtatttcccagtggggacaggattttcgcccaagttatgtgaagatcacagaattcatccgccagcttccaagacgcccggtcgtcagtgcatttacagcaacagcaacacagaaagtaagagaagatattcttgaagtacttgatcttgaatctccttatataaatgtatccggttttgacagagagaacctttacttcgaagtaagaccagcgcgtgggaagaaggatgcaattaaggaatatcttacacagcacagagaagacagtggaattatttactgtgcaacaagaaaaaatgtagatgaactctatttggaattgcagaatgctggattttctgtcggaagatatcacgcaggaatggggacagaggcaagaaatgaaagtcaggaagatttcatttatgacaggatagagattatgatcgcaacgaatgcatttggaatgggaatagataagtccaatgtccgttttgtacttcattataatatgccgcagagcatggaaaattattaccaggaggcaggcagagccggacgagacggagaaccggcagaatgtatccttttctattcaccgcaggatatcatgatcaatcagctcctgctggatagtaaagagcagattggagaatacacagaagaagaactccgggtgatccgggaacaggatgttctccggttacgtaagatgagtaattattgtacgataagcatgtgtcttagaaaatacatattgaattattttggacaagagacagaagaacattgtgggaattgttccaattgtctggaagaattcgtagagcttgatgtcggagagattgcggcagacgtgattgagtgtgtgcgcgaatccagacagagatacggtatgacaatgatcctttccacactggcgggagcgaatacagtgaagatcagaagtgcagggatgaatgaactttccatttatggaagacagagtaaatgttctcagcagaggctgaaagacgtagtttatacactgctcgaacacggataccttcaacagagcgcagatcgttatgcgatcctgaaactgacagaccggtcagaagaattactgaaatcgagagaattgaaacttcgctgcaagaagtcagaacttacagaaaagaaaaagtccggaagtggaaagaaagcgtctcatagaaagggagagagtttcaggaatcttacagataaaagccgagaattattcgaagaattacgttctgtgcgttattctttggcaaagaaaaaaggaattccgccatatatggtcgcttcagatcgtacattacatgagatgtgtgtacttgttccatttgaaaaagaggaactgcttgaagtacacggtatgggatttaagaaatatgaacagtacggagcagtttttcttgataagattcaagaagtgacagcaggtgataaaaaaggttacggtatatcagaagatgctgaggggacagacgcagttcagaaccagaatcctctggacatcggaccatttggaagcgtagagaattaacagcaaaaaagaagtaaaagaaagaagtgacataaaagtgtctgtaaaaatattttcaacattaaaaaattataaaaaagaatatttgccaaaagatattttaagcggaattatcatggcagcggtttcaatcccaatctctatggggtatgcacagatcgcaggtgttccggcggtgtatggactttatggatctgttctgccgatcctgctattcgccatgctctcaacttcaaaacagtttatcttcggagtagatgcggcaccggcggcaattgtcggagctgcactggcaacacttggagtgacggcagaatcagcccaggcattgcagtatgtaccattgatcgcattgtttacaggactctggttattgttgttttatcttttacatgcagataagattgttgattttatctcgacaccggttatgggcggatttatcagtggtattgcagtgacaattattatgatgcagattccgaaactgatgggaagcccggcggggactggagaattcatagaacttgcagaacacatttttcaggcaatcacaaagataaactggttgtcctttggaatgggaattggagcacttgtaatcttgattgtatccaaaaaactgattccaaagttcccgatggcaatcgttattatgattgccggagttctctcgacaattgtctttcatgtaaaccagtatggcgtagttctcctgcaggcagttcaaccagggcttccgcggcttattttcccggattttacagggatcaatcttacccaggctgtgggaagagcacttatggttgctgttgtgatcatggcagagacacttttgtcagagaacaattttgcatccaaaaacggatatgaactggatgaccgtcaggaaatccttgcctgtgccgcaggaaatcttgctgccggtgcagttggatgctgcccggtaaatggaagtatttccaggacttccatgaatgaacagtatggaggaaagacacaggttgtatccattacagcgggactgactatggcagttgtacttataggtgcaaccggatttatcgaatatcttccggttccggtattgacggcaatcgtaatctctgcactgatgaatgttgtagagacacatcttgcagtacgcttatttaaagtaagcagaaacgaattctatatttttattgcagcagggatcggtgtgctgttccttggtacgatttacggagttgtgatcggaattttgttatcttttgtagcagtgattttaagggctacaaaccctccgagatctttccgtggaatgattccgggaaaagaagtttattatgatctggagagaaaccgttttgcatatccaatcaagcatgtgattatttacagatttagcgagaaccttttctttgcaaataacaaagtgctggtttcagatattgaaaacagcatcaaagaggatacaaaggtcgtaattctggacgcatcagcaatcaacagcctggatattacagcggcagatgcactcgaaatgcttgcagcaagtctgaaaaaacgtggaattaagttctatatcacagaacattccagagaagttaacgatcagatgagaaagcttggaatcggacatttgataaaagaaggtgctgtgcgaagaacaattcttgcggcacttcatgatgcggggattgagcagccttgcccattggatattccagaagaagatctcgaaaaacttaagcgaagagaatatttttcccttcctgcagaagaagaaaatacactggaagagtttgcatgggcatttggtgatgatgcagtcaaagaaattgagaaacgagtgctttctattgtgaagcagatccatgagattacagatctcgagaaactttccgaagaaggaatcaaagaaaaactggaattttggaattcacttggagcacttgatgaagatgagttgctccgcagaatggaacttcacttagatgatcttccaagtgatgtaaaagaaaacaaaaaactcgtcattgaattaatcgagcgtagaagaagaaaacttagagatcgtcttctgaaagagcatccagagattgttgagcatattgaagagcgaagagagcggctggaacgaagacttgagaaacagaatccagatgcagtaaagcgtctgaaacactggaaagatgaagaattctaaagaacaatctttaagattcttaataaatcattaggattgttaaagtccccttgtttctgcaaaaaaggaatgctatgattaatatggaagaaaaagtcaggggacaattttgattgtcccctgattttaagaatagaaaagaaaaaagggataagcatgtggtctagagaaacaaaagaagaaaaagaacgcaagaaagaacaagcgttttatgaacattatagcgcgatgggaaaaagcacagattccattagaaaagagtgggagagacgcaagaggaatgaacaacgcattcgacgcatcaagagacgaaggagaattgcaatcatattgattctgttcgttgtattagttccggcagtttcaacatttacttattttaaaatgaatccgattgtattacggagtaaagtgatcgcgcaggaaaagaaagaaagtatggatctaatgtccaacatccgtttcgttgttggtggaaaagcgaaagatgtgaagacagaagggaaagtagatacgaataaagaaggaaaatatacggtttactatgtctacggtaaacaaaaagtaaaagcggaagtcgaagttaaggatacaaaagcacctgagcttaaaatgaaagacagttatacaacagaacttccgaaagatatcaagccggaagattttgtagaatcagtaaaagatgcatcagatgtcacacttgaatttgtcggacaggattcctgggagaagaaaggaaaatacggagtaactgttgctgcaacagatagtgacggtcataaaacagaaggtaaatcaacactgaatctggaagaggatacaacaggaccgactattgaaggagcagatgataaagaacttgcacagggcgatacgatggactttaatgaaggggttacgataaaggatgatatggatccagagccaacattggaagtacagggtgctgacaaagtggattttgcaacaccgggaacctatattgttacctatcttgcaaaagaccgttccggaaacgagacaaagattgagcgaaagatcaaagtgaaagagaatccggattggaatgagaaagttgtttatctgacttttgatgatggtccttcagagaataccggagagattcttgatatcctgaaagagaaaaatgcgaaggcaaccttcttcgtcacaggaaataatcaggaacatgatgatatgataaaaagagccttttccgaaggacattcgatcggacttcatacctatacacacgattatgcaacagtttacgcatccgaagatgcatacttcgcagatctgcagaaagtatcggatctggtagagagtatcacaggaatgaaatccatgatcattcgttttccgggaggatccagcaacaccgtcagtgcaaaatatgtcaaaggattgatgacaacacttacgaaagcagtgagagaccaaggatatcagtattttgactggaactgtgattctactgacgcaagcggaaataatgttccggtagaaaagctggtttccaacgcaacatcctgcacggcaaatcatgttgatattctgatgcatgatacagatgcaaaagatacaactgtacaggcattgccacagattattgattactatagaagtcagggatacacattcaaaggactgaccgttgatagtgtggcagcgcaccatggagtgaataattgataaatattagaaagagccaggacaggcacaacacacggtgtctgttctggctcttaattatatcttaatcctcatcatctgtctgtacagagtaagtctgtctctttcttgccatctcatcgctctcaagatattcatcataagttgtgatcttatcgatcagcttaccgcccggaacaatctccatgatacggttcgctgttgtctgtacgatctggtggtctctggaagtaaagagaagtactccagggaacttgatcagaccattgttgagtgctgtgatagactccatatccaggtggtttgttggctcatcaagaagcagtacatttgctcctgagatcatcatcttggagagcaggcagcgaaccttctcaccaccggaaagtacagcaactttcttcactccgtcttcaccggagaagagcattcttccaaggaatccacgaacataagttacatccttttcctcagagtactgtgtcagccactctgtgatattgtagtcattgtcgaattctccgccgaaatccttcgggaagtaagcctgagaagttgtaactccccatttatatgttccctcatccggttccatctcgccgatcaggatcttgaagaggattgtcttagcaaactcatttccaccaacaaaagcaactttatcctcgcggccaagtgtgaatgtaagattatcaagaatcttctcgccgtcaattgtcttggaaagtccttctacagagagaacttcattaccaatctcacggttcggacggaagtcgatgtaaggatatttacggctggaaggtctgatctcatcaagctggattttctccagggcacgctttctggaagtagcctgtttggacttggaagcgttcgcactgaatcgagaaataaattcctgcagctctttgatcttttcttcttttttcttgttggcctctttcatctgacggatcagcagctggcttgactcgtaccagaagtcgtagtttcctgcgtaaagctggatcttgccgtaatcgatatcggcaatctgtgtacataccttgttcaggaagtaacggtcatgggatacaacgataacagtgttgtcaaagttgatcaggaattcttccagccatgcgatcgcatcaagatccaagtggttggtaggctcgtcaagaagcaggatatccgggtttccgaacagtgcctgtgcaagaagaaccttgaccttctcagaacctgtcaggtctttcatcagtttataatgaagctctgtctcgataccaagtccgttcagaagattggcagcatcagattctgcttcccatccatccattgtagcgaactcagcttccagctcacttgctttgattccgtcttcatctgtgaaatcttcttttgcgtaaatttcttctttctctttcatgatttcatacagacgtgcatttcccatgataactgtatcaagaacagggaattcgtcatatttgaaatgatcctgctgaaggaaagaaagtctctcgcccggggagataactacatcaccggatgtcggctcaagctgtccggagagaatcttaagaaatgtagatttaccggcaccattcgcaccgatcattccgtagcagttcccctctgtgaatttgatgttaacatcttcgaacagcgcctttttcccgacgcgaagggttacgttatttgcactaatcatttgaaagtctccttgtaaataaattagaattgtgattacgttgttataattgtcctttttcaaatacgtgtgaataagaacataccaatccatatattaacatagaagaaagggtgctgacaagtactgaaatagaaaaaagcatacgaaaaagcagggcaaactgtgtgaaaatgtataagaactaatccttgttctttccattgtaaaaagttataatgttactaagaatctcacaatataaatagcagtagaaaagaggagaaaccatggcacttaagaaagcaacaatcgtactggaaggtggagcaacaagaggcatatttacttctggtgctctggattaccttatggaacaggatatttatttttcagatgtgatcggtgtgtctgccggcgcatgtaatgcagtagattatgtttccagacagccgggacgtacaagagactgtatgattccgaatacaaaagatatgaagtatattaatggagtgaaagatacgatcagggagaaaagtctgatgaatatggatttgatttttgataaatatccgaatgaactgatcccatttgattttgatgcatattttcagtcagagatgcactgtgagctggtaacgacaaactgtctgactggaaatgcagaatatatgacggaaacagaagatcctgaccgattgatgaagatctgtcgtgcatcaagcagtatgccgcttgtgactccgatggtgaatattgacggtgtcccgtatctggatggcggacttgcagattctgttccgatccgtcgtgcacagaagcttgggaatgagaagatcatagtgatcctgacgagaaatcagggctatcgtaagaaagtgatctcaccggcagtgcagaagctttacagacaggcatataagtcctatccgaatgcagtccggacaatcttcagaagaagttttatctataataagacgatgaattatctggaccagcttgagaagcgtggagagatttatgtccttcgtccacatgtaaaaccagtatcacggctcgaacagcatccggatgtcctgcatgcattttatgagcatggatatcatctgatggagcgaaagacagaagaaatgctgaagtatcttgaacagtaataaaaataaatcgacttgttaaaagaagagagaaaagggagttgagttatatgagagagattttagaagaaactcagaaccgtgaattatcgtggcttcggttcaatcagcgcgttctcgaagaagcacgggacgagacagttcctttgatggaacgtatgaaattcgtagctattttcacaagtaacttagacgagttttttatgatccgcgtaggaagtctgtatgatatggcatcagcagacagcaaaaagatcgatcagcgatccggtatgacagcaaaacagcagttagatgcaatttatcgagctgtttccccactttacaaggaacgggataagacatatgcagagatcaagaaacagttaagtccgtatggtgtctgcggtcttgacttcaaggaactggaacagcaggagaagaagtttgtaaagaaatatttcaaagaagaagtaatgccggtgctttccccacagatcgtagatgcgaaccatccgttcccacatctgttaagtaaagaactgtatgtggttgcgaatctgaagcagggagacaagacgatgctcggaatcatcccggtaccacaatatatttctaatattctctatcttccggggtatgacatccgttatatccgtatggaaaagattatcctggaatttattgatcttgtttttgaccagtatcagatctcagacaagaactatatccgtgtaacgagaaatgcagatgtatcaccggatgatgaagcttatgcagatagcggagatttccgtcatgtgatgcaggagacacttcataagagaagaaggatggctgttgtccgtcttgaggcagccaattctctgagtaaagagatggagaaatatttctgtgagaaattcaatatccgtccggaatgtattttccgaacaaagatgccgatgaagctggactttatctttgcaatcgctgataaacttccggattcgaagaaaaaaacgctcgtggatgtaccattttctccgcaaccgtcttccatgcttgcagagggtaaggtgattccgcagataaagaagaaagacgtactcctttgctatccatacgaaagcatggaaccgttccttcagctgatcaaagaagcatcaacagacccggaagttctgacaatcaagatcacaatctaccgtctggcaaagaaagcacgacttgtagaatatctctgcgcagcggctgagaatggaaaagaggttacggttctgatcgagctgagagcacgttttgatgagcagaacaacattgactggtccgagcgtctggaagaggccggatgccgtgttctgtacggattcgagggttataaggtacactccaagatctgcctgatcacatacagaaaccgtaccggaattcattacattacacagattggaaccggaaattataacgaaaagacagcgaagatgtataccgattactcgctgatgacaagcagacaagagattggtgaagacgcagcagtctttttccagaatatgtcgatcagcaatctgaatggagtttacaagcatctgattgtttcaccgacaagcctgaaacagaaagtacttgccttgatggatgaagaaattgcaaaaggtgagaacggaagaatcattatgaaaatgaattctgttacggacatggatttcattcgaaaagtaacagaagcatctcaggcaggggtgaagatagatctgatcgtgcgtgggatctgctgtatcctcccgggaatcaagggaaagacagagaatctgcgtgtgacaagtatcgtcggaagatatctggagcatccaagacttttcgtcttcggaaaaggagcagatgcaacagtttatattggatctgctgatatgatgacaagaaatacagagaagcgtgtagaagtcgcgtgcccggtctatgatgtagagatccggaaacgcctgttccatcagcttcatgtaatgctttctgacaatgtgaaagctcgcgcgatgacaagtgacggaacatatgtgaagaaaccggtggaagacggagcaagtcttgtgaatgcacaggagacctttatgagagaagcatcacaggcacaacgtccggctgcagccaatgtgccgaagaagaaaaaagaaggattcttaacaaccgtactgaagattttcagaaaaaaacaatagaaggacgagagatggaggagcagagaaagatgaaaccgttacagaaaaaagactttggaaagacatcgaaaggggaattggctaccgtatatacactggaaaatgaagccggaatgcagatcagtgtatccgacttcggagcaacactgacaagcgtacttgttccggataaggataacaatccggtagaagtgacacttggatatgatgatgcaaccggatatgaagccggacttggaaatgcattcggagcatctgttggacgtaacgcaaatcgtatcggtggggcagtgatcgagatcaatggaacagaatatcacctgacaaagaatgacggagagaataacttacacagcggacttgatttctatcacggaagattgtggaaggttgcggacgcagatgatacccatgtaacatttgagatggacagcccggatggagatcagggatatccgggagcacttgttatgaaagtgacgtattccctggatgaagagaatactttgataatccactacgaagcagaaccggatcaggatacgatcatcaatatgacaaatcacagttactttaacctgaacggacataagagcggagatgttctgaatcacacattatggctgaatgcggatgcatttacaccggcagacgcagcatccattccgacaggtgagatccgcagtgtggaaggaactccgatggatttcagaatagataagacaatcggaaaagacattgaagcagattatgaaccgctggtattcggaaaaggttatgaccacaactgggtattgaaaaatgaaggcgaatttgataaagtagcagaagtggccggggatgaaagtggaatccatatgagcgtactgacagatcttccgggtgtgcagatctatactgcgaacttccttgacggagtgaaaggaagagatggagcggtttatgagatgagagatgcaatctgtctggagacacagtactatccggatgcaatccaccatgaaaacttcccgggaccgatctgtaagaaaggcgagaaatatgatactcgtactgcctacagatttcgtgtaaaataattgaatggaagataaataattaatttatgggaaaatcagtatacattgcggagaaaccgagcgttgcccaggaattcgcaaaagcattgaaactaaatacgaaaagacgggacggatatcttgagtcagacgaagccattgtcacctggtgcgtcggccatctggtgacgatgagctatccggaggaatatgatccggcacttaagagatggaacctgcagacactgccatttatcccggaagaattcaaatacgaagtcattccgtcagtggcaaagcagttccagatcgtcagtgggatcctgaaccgggaagatgtcgatacgatctatgtctgtaccgactccgggcgagagggagaatatatctatcgtctcgtagaacaggaagcacacgttgagggaaaaaagcgacggagagtgtggatcgattcccagacagaagaagaaatcttacgaggaatccgtgaagccaaagatctgtcagagtatgataacctcggagcatctgcatacctgcgcgccaaagaagattatctgatgggaatcaacttttcccgtctgctgactttgaaatatggcaatagtatttcaaattttctgcaaacgaagtattccgttgtatctgtaggacgtgttatgacgtgtgttcttggcatggttgtgcgcagagaacgcgagatccgtgatttcgtcaagacaccgttttaccgcgtacttagcacgatcgatgcacagggacatacgttcgagggtgagtggagagcagtgaaaggctcccgctattttgagtcctatgacctttataaggaaaatggattcaaggagcgcaagaaagcagaagaattgattcaatacctgcagacaccggatgacgagtctgtaaatgtagcaggaatacagggacaggcaggattgaactgcaggatcgagtcgattgagaaaaagaaagagaagaagaatccccctcttttatataacctggcggagcttcagaacgactgttctaagagatttaagatcagtccggatgagacactgcgaatcgtgcaggagctgtatgagaaaaaacttgtgacttatccgagaaccgatgcccgtgttctgtctaccgcagtggcaaaggaaattacaagaaatctgaacgggctgtcaaagtatccgatggcggcaccgtatatgcaggatatcctgaatttcggaagctataagacacttgcaaagacacgctatgtgaatgacaagcagattacagaccattatgcaatcattcctacaggacaagggttgaatgcattgagtactgtttcatctactgcgaagggtgtgtacgacctgatcgtgcgaagattcctgagtatcttttatccgccggcagtttaccagaaggttgctatcgtgacgaagatcaaagaagaaagtttcttctcaagcttcaaagtacttgctgaggaaggttatctgaaagtggcaggcattccgaagaagaaagcttctcagacagccacaaaagatagcagtaatggaaacagtgagaataataacaatgatacaaatgacgaggcaggttccgattcttccgatcaaagcctggacaccggattgttcgaagtggtcaagtcattaaagaagggtgcagtccttcaggtcagagcattggatatcaaagaaggagagacatcacctccgaagcgttacaattccggttccatgatcctggcaatggagaatgcaggacagctgatcgaggacgaagaacttcgtgcccagatcaaaggaagcggaatcggaacaagtgcgacaagagcagagattctgaaaaagcttgtgaatatcaagtatctcgcattgaacaagaagacacaggtgatcacaccgacgctgcagggagagatgatctatgatgttgttgatcattccatccggtcactcctgaacccggaacttacagcaagctgggagaaggggctgaactatgtggcagaaggttccatcacatcagatgaatatatgagaaaactcgatcatttcatcaccagcagaaccgttggggtgaaaggactgaacaatcaatatcaactcagagcctgctatgaaaaagcagcaggattctatccgtctgtaaataataataataatacgacaggcagaacaaaaacaggcagcagaagtaaatgacacaataataagacataaatgtaagtcggttctaaccggcagaaaggaattaccatgttagaagcattaacagtaaaagaaaattattcattagaccagacaatcgcaaaagatatcttcaacggagttacttatccgtgggaagtacttccgaagatcagcaacttcatccttgaacttggagctacattgagcgaggatgaatacgagaaacgcggagaaaatgtatgggtagcgaagtctgcaaaggttgctccgactgcatttatcaatggaccggcaatcatcggaaaggatgctgaggttcgtcactgtgcatttatccgtggaaatgcgatcgtaggagaaggagctgttgtaggaaattccacagagcttaagaacgtgatcctttttaataaagttcaggttccgcactataattatgtaggtgattctgttcttggatacaaatctcatatgggagccggatcaattacatctaacgtaaaatcagataagaaacttgttgtggtaaaagccggagaagagaagattgagacaggcatgaagaagttcggcgcaatgctcggagatgaagtagaagtaggatgcggaagcgttctgaatccgggaacagttgttggaaatcacagcaacatctatccactttcttctgtacgtggattcgttccggcaaacagcatttacaaaaaacagggcgaagttgtgacaaaagaagaaagatagttgaaaatagaaaatgataagaatggctcctgtgtgataacatgggagctatcttagacaggaggaataaagcagatgaataaagtgggttttatcggtgtaggaatcatgggaaaatccatggtcagaaatctcatgaaagccggatttgaattacatatctatgcaagaacaaagagtaaagtagaagatgtgatcagcgaaggagcacagttccatgagtcaatcaaggattgcgtgcaggattgtgatgcagttattacgatcgttgggttcccacaggatgtagaagaagtatactttgatgaggggaatatcttagacagtgcaaagaaaggtgcttatctgatcgatatgacaacaacaagtccgcagattgctgagaagatttacgaggaaggtacaaaacgaggtttccatgtgatggatgcacctgtcacaggcggagatacaggagcgaaagccggaacattatccattctcgttggtggagaaaaggaagattacgaagcctgtatgtcactctttgaggcaatgggaacaaacattaattatcagggtaaggctggatgcggacagcactgcaagctggcgaaccagatcatgatcgccggaacactgtccggtgtgtgcgaggcacttacttatgcaaaagaacagggactggatccggaagtattcatgaagtccgttgcgacaggggcagcaggaagcaagcagcttgacacattcggaccaaagatcttaaaagatgattatgcaccgggattctttatgaaacacttcatcaaagatatgaagcttgcactgatcgaagcgaacagaaaaggactttcccttgatgtactcagtatggttcttgccaattacgaagaacttgagcaggaaggatacggagatctcggaacacaggcgttgatgaaattctatgatgaagaacatcgaaatacggaagagtaaaaatttgtgaatggtaaccgtaaaaattctgttaagaatcaacaaaacaggttgaagtaacagggaaaagaaaatataatagacatcagagaaaaaactgttgaagaatataaaaatcaacaacaggaagacttgaaggaggacacgaaaatgcttacagataattttgtaacaatggaaattggaaaagcaaaacacattgcactcgtagcccatgatggaaagaagaaagaactgattgaatggtgtgatagaaataaagaagtattacagggacatttcctatgcggaacaggaacaacagcccgtctgatcgcagagaaaacaggacttccggtaaaaggatactgcagtggtccacttggtggagaccagcagatcggtgcgaagattgtagaaggacagattgatttcatgatctttttgtgggatccgttagaggcacagccacatgacccggacgttaaggcacttcttagaatcgcagtagtatatgatattccggttgcgaacaaccttgcaacagcagacttcatgctgaatagcaagttcatgaatgagccttattccagacagattgagaatttcaataagacgattcaggaccgcgttgcggagatgaaataaaataatttaagtattaaaaaaatacctgcagatatcaattttgacatcttgcaggtatttttatggatttttacagaagtcctttttcacgcttctcaagaagagcatgaatcttatctgtcgggctgataacagagctgatcggcacatcatggttcagggaatcaatgatcagtgcgataaatttactcatatcagcttttacgaagtaaggtttctcataaagttccggtgggagatatgtaaggtttgttgtaataactttactgatatatcccttattgtaatactcatcgaatttatcaaatccgtctgtgaacagtccgaatgttgtacatacaaagacacgtccggccttacgatctttcagctgttttgcaacatcaagcatactttctccggaagagatcatatcgtcaacgataagaacatcctttcctgtcacatcatcaccgaggaattcatgggcaacgatcgggttctttccgtttacaactgtagagtagtcacggcgtttgtagaacatacccatatcaacaccaagtacattagagaagtaaactgcacggtgcatagctccttcatccgggctgatgatcatcagatgttctttgtcagctttcagatccggtacttcacggaacagtgcttttaagaactgatactgtgggttaaagctgtcaaatccactaagtggaatcgcattctgtacacgcgggtcatgagcatcaaatgtaatgatgttggaaacgcccattgcgtccagttcttccagtgcaagagcacagtcaagagactctcttcttgtacgcttgtgctgtctgctttcgtaaaggaaaggcatgataacattgatacggcgagccttacctgttgcagcagcgataattctcttcagatcctgataatggtcatccggagacatatggttaagatgtccgtttactgtgtaagtcaggctgtagttgcatacatcagtcatgataaaaagatcagtaccacggattgtctctttcaggatacccttagcttcaccggaaccgaatctcggacaactacagtctacctggtaattgttgaccttatagtttctgtaaagtggggattctgttacttcgttgatcgtgttctcacggaaggaaacaatataatcatttaccttctgtcccagaggtttgcagctctccatagcaatcagtttcagaggtgcaatcgggagtgtgttttctaacatttcgatgttcgtcattttcttctcctcagtgtgaattaatttttaaccgtcttaagaaatcagacagtaacgcgaattgattaattagaattaacagattaatcattatacatttaacgttataccatttttcaggagaaaattcaaggagggcagggcggagagtggacgataaaatgtattttttacagaacaagacagaaaataacaaacttgtcttttataaggtgcaatggtagaatcttaagtaggaaaatgtgcagcagagtttaatattgatatgagctgtccgcatgcttttatcagaagaaagaaatcggagtgcagcaggtagatgtggattctaaaacgatcatagaagctgtggtataagaaaagaaaaataaaagaaataaaaagagctttaatatctgaacgatacagtggtattgtggaagatattaaggctctttttatatataagggaagttttggataaaaatatttcgtagagtatacaactctacgaaaaaaatgaaattaagttgaatttatggggtttttaaaagatatgaccaattatttgacggtaaatacagcgtttagcttatccatgttttgctgtttctgctccatagaaggatgtacataccggtttagagttgtgttaatattggagtgtcctaaaatctcacttaacgtcttcatatcgaatccaagttctacgcaacgggttgcaaaagtatgtcgcagacaatgaaaatgaagtggttcgatctgacattttttcaaagtttttttgaaataatattcgatcgaccgcggctcgcgaaaactcttcttctttccagtgaggatatatgcttcgggatttatcgtgtgagattggacgtattgctgcaagatctcaaacaggaaatctggaatcggaatgatacggatggagctttctgtttttggtggagtgataatgatttttgtattatgttcggaatcatctgtgtgatccttaactctgtgtaaagtcttagatatctccagatattgttcctgaaaatgaatatccttccactgcattgcacaaagttccccaagacgtactcctgtatatagtgcaatcagcgtcccgatatttttatgtgtcagattccctaataaatagtcctgcaaggcctgctgttcctttagagagaggatccgaagcggtttcctgacggacttgactgaacagagttccgggttgcaaagagacagttccccttccttttcagcagtttttaaaattaatttgacaacagaacggatatcggtaactgttttcggagccaatccggaaccatcacttttccctgaaaccaataatctgttcagaaatacttcacaatctttattactgaacgtatagacaaggcgatcaccaatcataggactgatatagtggctgaaaagataatgataccttacataagtagattccttgcaggaaggcttcatccgttccagccagagcagtccgtaaaaggaaatgttcttcttcatacgaacactttgaaaaagacgtggatccatttttctttttgcatcattttgctttttcttaacagttaaataatctgctgcatagatagaacggtatctgggactaccatcttctttgaatgaataaatgtatctggcttcccagcgaccgtccttccttttgtaaatattttctcctcttcgtggcatatttttctcctccattttgaccatttttttgacggtaaataagtcaataatcacaaaaaataagcagtgctgtgtgatgaaaacgattaaattttcgcgtattattgataagaatgcacaaatttcgacatttcttccttgacttgaacgtataatgagagtaagatatcactgattaaagtctttttaaaccgtaaattaactataaaggaattcgtagagttgtatactctacgaaattcaaaaacagaataaggataggaatgagtatgggaagaagacccagagatctaagtggacagaagtttggactacttactgccatgtatccgacagaacgcagagaccatagaggttctgtgtactggcattgtgtctgtgaatgcggcaatgagattgatgtatctgctggtgcattgatggatggtaaaagcatttctttccagaaggaagaaggtgcttttgtaggtcttgacgttacaataaagtttaagtacgtgattgtagtaattatttgtgctgtggcaatcatgggtggaacaagctattatagtagtgtatatccagagcagaaagtaactgatgtacaggatacagttactcagaatgaaatgcaatccccagtcgatgatgaaggctttgtatttgctaagagtagcagcgaaatgctttcggaagaaatggtgttggctctgagcgatgacaggacagtaggatttcagaggcttttaagaatgtctatcaatgaaatctatatattatataattatgcggtaaaagatcaagaaggattacttagtttgctggctcagtatgattaccccaatataaaagaagatatgggttgaagacatcgtattgggattttagaaagtatctcgaaaaatatgcagaagattttctcgtacagatggagaatatgtatagtattgcgccttttgaaaggctggataagcgatttaaaaagaataaaaacattcaaaatcgccgggatgacgctatatataaaacactgtggaaaaattttgaatatggacttggcgaagcgaatgaagcagagatgttggacttttctaaatcaatagtagatgatttggacttagatggagatccagttggaataaaagacacaatggatgattattgggaagaacaatatagatttattgagggacttaatgaatatgtaggcaaatggattaggcaggtacgtttattcaaagcagcgccaatgaaggctacttttattgataactctgaggattatttttttacatttaattataccagcgtattggaacgtatatatcgtgtaccgtctaaccatatattacatattcatggcggattatatccatattgtgatgaacctccaattctgggacatggaaatgtgaagaaaataaaagaatatcgtgagaaagctgaaagggctgctgaagaatatgacgaaggaaaagaaagtatatacaatgcagttgcaaactattatgagcgaacttttaagaatacaaatgaatgtatgtccttcagaggatttttttttcggcaactaacggaagttaataatgttgaaattattggacattctttcggagaagtaaatatgccctattttacatatttgaaatactgtatttcaaaaaatgcaaagtggaaattttattatcacagttcggaagactataatgctgcagaaaaagcggttaaagaattggaattggacataggggattatgaaatactgccatcagattgtttttggcaataaagtgatgaagaagatgggagtgtgaagcggcgaattgtcagcggaggaaactgcacgataaaatcggcagttttcccttcctgactgcgcagcttatctgaaaaaagcattttctgagcagaagaacggcacaatctcgtagttttatcttatgggagcatactgctcttataagataaggctatgagcacgaagtggtcacagctttaaaaacagaatacatatggatcagaagttctgattgttgacagcagcaaggatgatggaaagttgattaatctggtgacagctcatgagattagtaacacttaagaaatcaacgtgtatgggtctgtcacggaaacaaaaatttagatacaggtaataaaatactgttctgatttcaaaaataattcagcttgcaatattaggattctcatgttaatctaataccatacagtccacattctgatggactgcaaaaagatctatgaaccaaatcggtaattattcaataagctcagttttccgagcagataatccgatgacaaaccaaaaagatgaatattgtttgaagattatgtgatggagtaagtttctcgttactgtttctcaaatatctgattttaacgggatagttacttccatagaaaactatcttgtgttaagataaatataactttagaatcctcttcttcaagcaagtatttattgtacagaagagaggagaattctatgaaagaaaacgagaaaagtgtatcaactaagagagcaacatcacattgtaaagcattgaaagagacgcaagaagattttatcatgcttccaacggtagatttctgtttcaaggaattaatgcagaatgataacatccgcaagaatatcattgcagcactactaaacgttccgcccagtgaggtagagaatacggaacttatgcctacgattcttagaaaagaatcgaaagatgataagtatggaatattagatgtccgggtgaaactgaaagatggagaacagattgactttgagatgcaggtagaagcatttgattgctgggcaaatcgttcggtttattatctgagtaagatgtatacaagtgaaataaaagaaggcgatggatacgattgcttgaagaagtgtatccatgtgagtattcttgcatatgatcattttctagatgataaagaatattatcgaagaattgcattttgtgatacgaagacaggaaaagagtatacagatcttatggagatgcatatcttagaattgtcgaaacttccgccggaagagaagaatgagacaagcttgttacagtggatgcgctttcttggaggaaaaaccagaaaggattttgaagagatggcaaagaagaattcagaattggaagaagcgtatgacgtattggataaattaagtgcagatgaaaagaagaggttagaatacgagacaagacaaagagcaatcagagattataatataggcatgttaaccgcagaaagacgaggaattgaagctggacgcaaaattggaagagaagaaggggaaactttgggagtaagcagaattaatcaactaattcttgaattatcaaagcttggacgtacagatgatatcgtgaaagcagcagctgacagggagtatcaggaaaagttgttgaaggaatttgatttataacagacaaactaaagattatttaagaaaagacgataagctcatatttgaacctatcgtctttccttttatggttataaaaagtttattatgaagatggcataattataacgcaaatgattaacttaacatcatacggtcatttgcgaattctccgccactgacttcctcgaattttgcaagaaggtcagataccttaaggtttttcttttcttcaccggatacatcgtagatgactcttccttcatgcatcatgatcaggcggttgccgtgtgcgatggcatctttcatattatgtgttaccatcatggctgtcagattattttcgctgatgatcttgtcagagagtgcaagtacttttgcggcagtctttggatcaagagcggctgtatgctcatcaaggagcagaagtttcggctttttaagggaagccatcagaagtgtgatcgcctgacgctgtccgccggagaggagaccaaccttactgcttaagcggtcttcaagtccaagatcaagttcttttaacgcttctctatagtgttcacgttctttctttgtaacgccccagccaaggcctcttttctgaccgcggcgtgcagcgatggccatattttcttcaatagacatcgttgctgcggttcctgtcataggatcctggaacacacgaccaaggaagagtgcacgtttatgttcggaaagttttgtgatgtcagtaccgtcgatgataatatttcctttatcgattccccatacacctgcaatcgcattcaatgttgttgatttgccggcgccgttacctccgatgatcgtaacgaaatctccgggatttaagttgaggttaactccgttgagggcacgtttttcattgattgtaccggcgttaaatgttttataaatatctttgatttctaacatgtatcccattattttgcccgtcctttcttgaagtaagtatctttcatataaggaactgcgaggaagcatgcaacaactacagctgagaacagtttcatataatcagatggcatcttcagccagagtactaatgcgattacaaggtagtaaaggattgctccgatgaagactgcaccgagtgtgaaggcaaaagctgcttttctgtgtgcacagaattttccgaagatcacttcgctgatgatgacggctgcaagtccgataacgatcgcaccacgtcccatattgacatcagctgcgccctggtactgtgcgtaaattccaccgcaaagtcctacaagaccgttggagatcataagtgcaagaactttgttgaatcctgtgttgatgccctgagcacgagccatctgttcgttacatcctgtcgcacggatggatgcaccgagttctgttccgaagaaccagtagcagagtgcgatcagaatcagtgctgcaaggattaatttcaggaagaagatccagttgccttctccggttacataacgaagagaagcaaccagtttgtactgcatgacattgaccgcctggttggattttcccataatgccaaggtttacggagtaaagtccgatctgtgtcaggatacttgccagaattccaggaattccgaaaaatgtatgtaagactcctgttacaaatcctgctgccatacctgcaagaaatgcaaagacaagtgcaagtgcaggattcacacctgcgcggatgagcataactgcgactgcaccgccggttgcaagtgaaccgtctacggtcagatctgcaaagtcaagtatacgaaatgtaatgtaaacaccgagtgccataattccccagataatgccctgggccacgttgcccgggagagcacgtaccagagtcattggatcaagggctgcgaaatatgctgccatgatttatccctctaatctttctttttattgtttcatataaatagataagtataattaaggttactgttcacaggtaatatcccgcgaggtgttttgccatgaatatggcaaaatcccgagacatacggggcaaaattccatcaccgaaggtgatttggaatgaattttgaccaagttgctgtgaacggagtgaacagtaactagaatcaagagcgaccattcatctggatgaagcccgctcttgagaaaaatatgttttgtttaatatcttctaattaatatgttccggttgaatggaagaatcttattcttcgattgcttcatatccgtctggaatagtaattccaagttcctcacagatggtaggattgtacatctttgttacattcggggcactttcaatcttcattgtagtaatgtcagcaccgtttacaaggatgtcgtaagccatctcaccggctttgtatccgatatcgtagtagctgatagaaagtgttgcaataccgcatcctttacagattccctgctcaccggcgattacaggaaccttagccggcagacagatattattgatgatttctgtgtttgaagccattgtgttatctgtaggaatgtaaagtgcatcacattcggaaactgcatttgttacaacggactgaatctcattagaatcagcagctgtgtactctttgtatgcgattccatctttctctaatgcttcagcgaaaagctttgcctgatatgctgagttcggttcagcggagcagtagagaagtccgactgttttagcatcaggaatgagttctttgagcattgcctcctgctcatcaatcggtgcaagatcgcttgttccggaaatgttcatgcctgttgttcctgtccagtcagagatatcaagtgctgtagcatagtctgtaacagatgttccaagaatcgggatatcacttgttgctgcgcttgcacactggagtgctgttgttgcatttgcaagaatcagatccacattatccgctacgaagttatttgcgattgtagcacagttagcctgctcgccctggccgttctgaaggtcgaatttgacattgccttctccgaacttttctgtacaggcatcttcaaatccttttgttgcttcgtcaagagcagcatgctctaactgctgtaagataccgatcttataagtctttcctgaatcggatccgttgtctgcgctcttatctgtagagtcggatgaacttccgcatgctgcaagtgaaagtgtcattccggcagccataagtactgctaaaattttcttagatttcatgattgtgtcctccctttttcgattcatacaatccacgctttaaaccgttacgctttaaagcactaaactgtaagatgtcatgtgttaaattatagcacgattatttgatacgtcaagtgaaaatggaacaaaaatgcaagattgttgaaaaaaatgttgcaaaaaaacaatgctttattcgtctggaagattgtgatattataagatatggtgtaaaattaagaatcatgaaagtctttcttctataatatggggatttttgctgcaaagaaattaacagaaggatttttatggaattggataaaggagtttatttttatagatgaagaaaaagcacgaacacattatagaaagtgtgcggccgggaagtattgcggaagagctggggattgaaccgggagatattctgctggagattgacggtcaggtgatcgaggatatttttgactatcagttttatgtggaatctgaggagctgcttgttgtgatccgaaaagcgaacggggaagaatgggagcttgaaattgagaaagatgttgatgaggatctgggaattgatttcggtaagggactgatggatgagtatcattcctgccataataaatgtattttctgttttatcgatcagatgccgccggggatgcgtgatacgctgtattttaaggatgatgattccagactatcattccttcaggggaactatgtcacactgacaaatatgagtgagaaggatatgaatcgtattgtccgttatagactggaaccgatcaatatttcgttccagacgacgaatccggagcttcgttgtaagatgcttcataaccgttttgcaggggaggctttgaagaaagttgatattctgtatcagggcggcattgagatgaacggacagattgttctttgccgtggagtgaatgacggggaagaattggaacggagtattcgtgacctgacgcagtatctgccgcttttacgcagtgtgtcagttgtgccggttggactttccaagtatcgagatggattgtatccattagagccatttacaaaggaagaggcgaaggaagtcattcgcacgattgagaagtggcagaagaaagtctacgcagaatacgggatccattttattcatgcaggagatgagtggtatctgctggcagaggaagaagttccggaagaggaacgttatgacggatatcttcagctggagaatggagttggaatgcttcgtcttttatttaatgagtttgaagaaggttatgcgaagctggaaagcggagaacatcaggaagagatttctcttgcaacagcaaagcttgcatatccgtatcttgagcgtatggcgaagaagatggaggagaagtatgagggacttaaggttcacacatattgtatccggaatgatttcttcggagagcgtatcacagtctctggtctgatcacaggacaggatctgatgaagcaattaaaagatcagccacttggaagcaggcttctgatcccatgcaatatgctgaagatggacgaggacattttccttgatgactttacattgaaagaagtatcagatactttacaagttcctatagatattgtaaaatcaagcggacaggatctgatcgatgctattttaggtgtcgcaggtccgaatcccacagatatagataagaatcagatgaaagaccgtaggatcactacggcttaagagaaactatttaagagaaaataagagaaaacaggaaggtaagaatagaatgagtaaaccagtagttgccattgtagggcgcccgaatgtgggtaaatcaacactcttcaatgtcctggcaggagagatgatctccatcgttaaggatacaccgggtgttacaagagacagaatttatgcagatgttgactggcttgacagagacttcacactgatcgacacaggtggtattgagccggatagcagtgatatcattctttcccagatgagagagcaggcacagatcgccattgacacagcagatgttattatctttatcacagatgtaaagcagggacttgtggattcagattctaaggttgcggatatgcttcgccgttccggtaagccggttgtccttgttgtaaataaggttgacaattttgataaatatatggctgatgtctatgaattctacaatctcggaatcggagatccggtgccaatctcagcagcatccagacttggtcttggagatatgcttgatgcggttatagcacatttcccggagtgggatccatcagaagaggatgatgaccgtccgcgtatcgcaatcgtaggtaaaccaaatgttggtaaatcctctatcgtaaaccgtctgcttggtgagaaccgcgtaattgtatccaatatcgcaggtacaacaagagatgcgattgatacagagatcgtgcataacggaaaggaatacatttttatcgacacagcaggtcttcgtagaaagaataagatcaaggaagaactggagcgttatagtatcatccgtactgtaagtgcagtagagcgtgccgatgttgtacttatggtgatcgatgcgacagaaggtgtcacagaacaggatgcgaagattgccggaatcgctcatgaaagaggcaagggagttatcattgtcgttaataaatgggatgccattgagaagaatgataagacaatgaaagaatacgaaggaaagatccgtcaggtactttcttatatgccgtatgcagagatcatgtatgtatctgcactgacaggacagagacttccgaaactgtatgacatgatcgatatggttattgagaaccagacacttcgtattgcgacaggagttctcaacgagatcatgacagaggcagttgctatgcaacagccaccgtcagataaaggcaagagattaaaactctattatattacacaggttgctgttaagccgccgacatttgttatctttgtaaatgacaaggagctgatgcatttctcctatacaagatatcttgagaataagatccgagaggcatttggcttcagaggaacttcactgaagttcttcatccgtgagagaaaggaaaaggatcagtagaatggaacgtattatctgtctggtgatcggatatgcctgtggacttctgcagagcggttatctggtcggaaagatgcatcatattgatataagaaaagcaggaagcggaaattccggttcgacgaatgcactgcgtgttatgggattgaaagcaggacttatgactttcgcaggagatgtattgaagtgttttgcagcagttctcattgtccgtgcgatataccatggaagtaatattcttccgcttctgatgatgtatgcaggagcaggagttactttggggcataacttcccattttatatgaattttaaaggtgggaagggaatcgctgttatggcagcacttgtggtaagcaactgtttttggcatctgccgtacagttccatcctgttttttgttacactggcattctttcttgtgccggtgcttgtgacaagatatgtttcccttggttcattgcttgcttatgcagtgttttttatccagatggtgatcttcggacagcttggatggtttgatatggcgaagggtgcggtatatgagttatatgtgatcacgttcttacttacagcacttgcatggtacagacaccgcgccaatattaaacgtctgttgaatggaacagagaataaattcggttcaaagaaataaaagaagcgaagaaaaggagagatgatatggcaaaagtaggagttcttggggcaggaagctggggaacagctctggcaatccttcttcatgataatggacatgatgtaactgtctggtcgatcgatccgaaagaagtggagatgttgagtgagaagcgggagcatgtatcaaaacttccgggtgtccatatttcagaagagattatgatcacaaatgagatggaagaggctattaaaggaaaagatttcttagttcttgcagttccttctatctttacaaggagtacagcggcaaagatgaagccgtatgttgttgatgggcagatgatcgttgatgtagcgaagggaatcgaggaagatacactgatgacgctgtctcagcagatcagccaggagattccgcaggcggacgtagcagtgctcagtggaccgacacatgcagaagaagtaggaagaaagcttccaacatcctgcgtgatcggtgcaaagacaaaaaagacagcagagtacttgcagtctgcatttaacagtaaagtattccgtgtgtatacaagtcctgacatgcttggaatcgagcttggaggttctcttaagaatgtcatcgcacttgcggcaggaattgcagatggtctcggctatggagataatacaaaggctgctctgatcacacgtggtattgttgagataggaagacttggcgtgaagatgggcggcaagttcgagagcttttgtggacttaccggaatcggtgatctgatcgttacttgtgccagtgttcatagccgtaatcgtaaagccggttacttgatgggacagggcaagtctatggaagaggctatgaaggaagtaaacatggttgttgaaggtgtctattctgcgaaagcagctacaaagcttgcacagaaatatgaggtgccaatgccgatcgtagatgagatcaacaaggttctttttgaaggaaaggatccaaaacaggcagtagatgacctgatgcttcgcgagtctaagattgagaactcttctcttctctgggaagaataagagaacgaaacgaatataaaattaaaagtcatacccctttgtctggctgcatacattggtatcagcagaacaagggggtatttttatggattcatttcaggtatacaaggatatgaaagcaaggacaaacggagaaatctacatcggagttgtggggccggttcggacaggcaagtcaacgttcatcaggcgttttgcggagcttttgattttaccgaatcttaaggaagagcatgtaaagcagcggacacaagatgaacttcctcaggcagcatcgggaactacgatcatgacaacagagccgaagtttgttccaaaagaagcagcggatgtaaagctttcagatgacatagaggtgaagatccggctggcagactgtgttgggttcatggtggatggggcgaatggccatactgagaatgggcaggagcgtcaggtgaagacgccatggtatgactatgagataccatttacaaaggcagccgagatcggaacacaaaaggtgatacacgatcatgcgacgattggatttgttgtgactacagatggaagtgtgacagatctgccaagagaaaactatgtggcagcagaagagcggacggtgaaagaactccggcagatcgggaagccatttcttattttattgaattgccaaaaaccgtattcgaaagagacggaacgtctgaaatcagtgcttgaagagaaatatgcggcacctgtttatccggtgaattgtgaacagctcaaagaagacgatatttatgaaatgatgcgtcaggtactgtatgaatttcctgtcacggaaatagaattttatattccgaaatgggtggaaatgttgtcatgtgatcacagaatcaagaaagatctgattgagaatgtgaagaaaattatggctcagatgtcagatctgcgaagtgtctccggaaaagactggaagacagaaagtccatacatagaccagatcctgttggatcaggtagagatggacacaggaaaggttatattgcggatttctttctgccagaagtattattatgaagtgttgagtgagttgacaggaactcagatccgcagtgagtatgaattgatttctctgatgaaagagctttcttctataaaagaagaattcagtcagatcaaggatgcatttgcggatgtgaagatgaaaggctacggagtagtcagcccgaagaaagaagaaattcatctggatgagccggtaatcatcaagcagggaagtagatatggagtaaagatccgttccgaggcaccatcgatccatatgattcgtgcgaatatagaaacggagatcgcaccgatcgtgggaagtgagaaacaggcagaagaccttgttgcatatattaaaaaagagagcgaaggtccacaaggcgtctggggaacaaatatttttggcaaatcaattgaagatcttgtgatggatggtatgcgtaataagattacactgatcaacgaagaaagtcaggtaaaactgcaggattctatgcagaagatcgtaaacgacagcaatggtggtctggtctgcattattatatagtgatcgtgagctttttttttacaggaaaatatgataagataaacagtaagtaaaatatgcaaaagaaagcgaggaattcagtgttgctgaatcaccaacagagaaagattcttgaattattgtgtaaaacagaacatgtgactgcgagtgaactggccggtcagcttggaattggcgtgaagacagtaagagtcaggatcaaggaactgaatccggagcttgagaagaatgggatccagattttatcaaagtccaggtacggatattatttggatccaagacagccggaaggtatcgaaggactgctgaatccgaaggagaatgaagatccggtgattccgtcgaataatcaggagagagtacattttctccttgcatatcttctgaacagaacggaatatatcaagtcagaggagttgtgtgatttcctttatatttctaaggggacgctgacgaatacactccggcaggttgaggaaacttatcagaagtatggtattacagttcataagaaaccggggtatggtatccgtgtggaaggcagtgaatttaatctgcgtcagtgtatggtggatgtctttgtaaagcaggatagtctggaaggaatcggaagacggcatcagacggatgagatcgagacactggggaaaatggtctatcagtgtctgaagaaatatgaaatcgaactttctgagattgcttacaatgactttgtggaacatatttatgtggcaatgcgaaggatacgtcaggagaaatatgttgaatcgcaggcagcggatatgcttggaagaaaagagaagcagtttgtggaagaactgacagagctggtgggcacgcattatcagattcatttttctcaggatgagaagaattatctgacactgcagcttgtggggaaggtttatatcgacagtgagacagaacaggaaaatttcgtgatgcaaagcgagatcgaccgtcttattactgagatgctggagatgatctacagggaattccatgttgatttcaggaatgattttcatctgcgtatggagctgaaccgacatatggttccgtttgtccttcgtatgaaatatcatatgatcctgcgaaacccgatgctggaagagatccgtaagaattatgtgctttcttatacgatggcgtcccaggcggcaattgcactgggggaatattttcagcagtcgatttcagaagatgagattgccggactcgcagaggttcttgaactggctttggagcagcaggagaatgaacagaagaagttttcgattctgatcgtatgtgcatctgggaagacgagttcagaaattctcagatataagtacagcagagaatttaaagagtatattgaaaagatttatgtatgtaatctttatgaactggagaactttccgtttgaaaaagtggattatgtatttacaacggtacatatctcttcttatgtaccggtaccgattttggagattggttcctttctgcaggacaatgacattgacagggtgagaaagctttttgtaagagagagtaaggattttctgcagaaatattttaagaaggaattattttttacggatgtggaaggaaagacgaaggatgaggttctgaagaacctgtgccggaaggttgagaaggagaagggacttccggagacattcactgcatctgttttgaagagagaggaacttacaccaacagattatggtaatctggtggcacttccacacccggagcgtgccttccaggagcgtgcttttgttgcagtggcagttctgaaagaaccaatattctggttccggcagaaggtgcaggtcgtatttttgacggcgatcggaagggaagaggatgagaatctgcagcagttctatgaggcaacgacagatctgatccttcgtccggcagatgtgcagaatctgattcgtcatccggattatgacaggttgatccagttattgcgcagagcagaagaataaaatgtatttaatctccttgatgaatgtgattatatgttcagtgattcaaaagtgaccacattgattgtggtcattttttgagtggagctttttaaaaatatatgttaaattaaggtcagtcgagggacaggaaaggaaatgacgatgagacatctaacattgatctgtatggcaggtatttcaacgagcctcttagtgaataagatgaaacggctgattcggaatgagaatcttgagattgcagtcacagcgatgtcggaacgtgcatttcagggttacacaggtcagacagatgttctgctgcttggtccgcagctgggacatcggttcgaaagcctgaaagaacagtatgagtccaaaggcatccgcatagacaggattgatccggagcgtttcggagcaatggatgcgaaggctgtactggagcaggcatttccagacctgtctggacaaataggtgataaataaaataaattaaagataggagaatgtatcatggcaaaatttacttatgtagtacaggataacgaaggaatccacgcaagaccggcaggaatgcttgcaaaagaagcaaaagctcttgagggagttaaggttacaatagccggaaacggaaaaacagctgacgctacaagactgatggctatcatggctatgggtatcaaaaaaggtatggaagttgaagtaacagttgaaggtgagaacgaagaagctgcagcagctaagatggaagagttcttcaaagcaaacctgtaagagaaagtcatacatatactcattcaatttctagttaagaaaagatgttttaacagatcaataataaggattagccctccggaagaaagatctgtcaggacatctttttgtttttattgaaaacgctccgcttaggatgcgcactgcggcgtataatgtaggcgtcgcaagcgaccgccgcaggcgcaagaatgtgcctcggcacattctttgttctagttgcacaaaagtttattgttctgtataatgagaaagtacgagtggagatcatagtagaattaagaaaggggcagacagaagatgagagcagttattttatcattagatacaggggcatataaagcaaaagcggatgtggcagcggcagcatcactcaaaagaatgctggagcaggttgggattgaagtccgggcagcaaaagcatttccagaggataaagaaatgttgaaaacagtgctctgtaagctggcagatgcgggaatggttgaactggttctgacaaccggagcagttggattcctggagaagcattgtgcgccggatgctgtgagggagacagcagaccgtctgcttccaggtattccggaagcactcagggcttataatcttcgtcatacaaagaaagtgattctggatcgttcagaggctggaatcagaaagaagacattgatgatcaatctgccggagagtgccaagatggcaaaggaagatctggaatatatacttccagaagtggtacaggtggtagatactttttcattaagataaaaacagaaggatggaataacaggagagattgaaaatgctggtaaaaatatatacagatggtgcagcgcgcggaaacccggacggaccgggcggatatggaacagtgcttgagtatgtcgacacgaagggacagcttcataagaaggaattgtcccagggatatgagaagacaacgaataacagaatggagttgatggctgtaattgcaggtctggaggctttaaaccgttcctgtgaagtagaagtctattcggattcacaatatgttgtgaatgcgtttaaccagcactgggtagacggctggatcaagaagggatggaaacgcgggaagaatgaaccggtgaagaatgtagacctttggaaacgtctgttagaagcaaagcagaaacacagcgtgacatttcactgggtaaaggggcatgatggacatccacagaatgaaagatgtgatgaacttgcaacaactgctgcagatggaacgaatcttatcgtagacgaagggctgtaagaattcgaaaacaatgattgattaataaaaatcaagaagaaaatcttgaaaacagtggacaacagagggatttcttagtataattgaaaactgtgttgagtaagacagacaatcgcggctgcaagtgccgaaaggccgcaggtgaggaaagtccgggcttcatagggcaggatgccggataacgtccggtggaggtaactcccaggccagtgcaacagaaataaaccgcctgtgcattttgtgcaggtaagggtggaaaggcagtgtaagagactaccgccttgctggtaacaggaagggcacatgtaaaccccatccgaagcaagaccgaatataagcaatgtggctgcccgtcacgcttaaggtgggtcgcttgagcgcagcggtaacgcggcgcctagatagatgattgttcaacgacataacccggcttatcgttttgctcaatcaatggagggagtttctatttagaaactccttttgtattttagttattaataatgcggaagaagttatttgagatagattcttttgcaagagacagacaacggaggaattaagaccatgggaatgaaaattaatgcagaattaccattacctgcaaacctgaaggcggaatacccgcttccgaaagaactggcagagatcaagaagaaacgtgatgcggagattcgggagatttttgaaggaaaatccgataaatttgttgttatcgtgggaccatgttccgcagacaatgaagattctgtgtgcgattatgtgaatcgtcttgcaaaagtgaacgagaaggtatcagaccgactgatgatcattcctcgtatttatacaaacaaaccacgtacaacaggagaaggatataagggaatgctccatcagccggatccggatcaggctccaaaccttcttgagggtatcattgcaatccgcagaatgcatatccgcgcgatcaaagagacaggactgacatccgctgacgagatgctttatccggagaacagaagctatcttgacgatatcctttcttatgaggcaatcggtgcccgttcggtagagaatcagcagcaccgtctgacagccagtggaatggacattccggttggtatgaagaacccgaccagtggagacttttcagttatgatgaactccgtaattgctgctcagaactctcataatttcatttacagaggaatggatgttacaacagaaggaaatgatcttgcacatgtaattcttcgtggtggtgttgacaaatatggaacctgtattccgaactaccattatgaggatcttgtccgtctggtagatgtttatgcgaagaaagacttgaaaaacccggcagcgatcattgatgcgaaccattctaactccaataagcagttcaaagaacaaattcgtattgtcagcgaaattcttcacagcagaagatacaatgatgatgtgaagaagatggtcaagggagttatgatcgagagttatatcgaagaaggaaatcagaagatctgcgatcatatgacttacggaaaatctattacagatccatgtctgggatgggaagatacagagaagctgatttacaaaattgcagaagagtgttaaatttataagagccaggacagataccacacacggtaactgttctggctcttatattagatgtgggagtcaatcccacatctgatatagataaacgatggattatctgcggctatatttctcctcgcagtactggcatctgtatacctgattctcttcatcagtaagtacaaatacatgatcaagtccctgctcgatagatgtgatacatcttgggttcttgcagcggatcacatttttgatcttcttaggaagagtcagaggtttcttggagatgatctctccgttttcaataatatttacagtaatgttgtgatcgatgaatccgaggatatcaagatccatgaaatcgatcgggcattcaatcttcatgatatcttttttgcccattttattactttttgcatttttgatgatggcaacacagcagtctaatttatccaggtgaaggtatttataaatctccatgcttttgccggcttcaatgtggtcaagaacgaatccttcagcgatacgtcctacagttaatgtattttctaacattttgttacccctttcgtactatgaaatatgattatattagtcaacgtgaatatccaaaagtgtaaggatcagagccatacgcacatatactccgtactgaacctgacggaaataagcagcacgtggatcgtcatcaacgtcaacagagatttcatttacacgcggaagcggatgaagaacatacatatcttccggagcgagtttcattttctctttgtcgagaatgtagaagtctttcatacgtacgtagtcttcttcattgaagaaacgttctttctgaacacgtgtcatgtacagaatatcaagttttggcattgcttcttccagacgtacaacttcttcgtaaggaatgttcatcttgtcaagtacatcatgacggatgtattccggaagtcttaattcttctggagagatcagtacaaaacggatgcctgtgtatctcacgagtgctgtgatcagtgagtgaacagtacgaccgaattttaagtcaccacacagaccgattgtcatgttgtcaagtcttccttttacgttaaggattgtgagaaggtctgtcagtgtctgtgtcgggtgctggtgtccaccgtctcctgcgttgatcaccggaattttagaatgctggcaggcaaccatcggagcaccttcttttgggtgtctcattgcacagatatctgcgtagcaggagattgtacggattgtatcagatacactttctccttttgaagcagaactggagcttgcggaagagaatcccataacgcttcctccaaggttcagcattgcggcttcatggcttaaacgtgtacgagtacttggctcatagaataaagtcgcaagtttctttccgtcgcaggcatgtgcgtatttgtcaggatgtgcctcaatatcctgcgcaagtttcaacagttcgtccagttcttccactgagaagtccagtgggctcattaaatgtctcataagtaacctccttgtgtgattgaatcacattatttatattctagtagatcagtaacggcttttctcttaggtgcttgcggatcatcatccggccagccgactgcaatcagagctgccagttccctctctggcggaatctctaaaagttctgtaattttttcctcatcaaagatgcccatgattacagtaccaagtccctgttcttttgcagcaagacagaaagactggcaagcaacaccaacgtcaaacatctgccatctgtcccccttttttgtgctgtaggatccgtcacgttcaaaaccggatctgcttttgataaaagtaacagcaaccagcataggaatttgacggataatattagaattgtaaacaggggtataatcatcagcgatctttttgagaatagaggggtcttcaattgcaatataacgagtgatctgtgtgtttttccaagacggagaataggaagcaatagaaataatagaatcaataatagaatgatcaatatgatcaggtttatattttcttatgcttctgcgcatcttgatacaatcagaaacgttcatttgtatacctcccaatgttttattcgagacgcttgaatcagataaaaaccgattgttctcgtattccataccatgatatactaaaacgagaagattttcaacaggaaaataaacttttttcaaaggatagattttgtggaaaaaatgtattatacttggtactgttcatgcagtgtttttactataattaattgtgttacaaatcagtataaaagagatgcagtatggatggagttttttagtaaggagaagttaggatggcaacacttgaagaactgagagtagagctcgacaagatagataaccagatggtggaactttatcagaagaggatgaatgtctgccgtgaggttggagattataaggtgaaagccggacgtaaagtgtatgaccggcagcgggagcaggagaaacttgcagatgtggcatcaaaggttgacaatgattttgataagaacggggttcgtgaattatatacgcagctgatgtctatgagcagaaaactgcagtatcagaagctggtagaagcaggcgcacttggaaggcttccttttattcagattgattctcttgagaaggatactgccagagttgtgttccagggaacagaaggtgcttacggagaagcggcaatgcatcagttctttggagaagatgtgaattgctttcatgtaagaacattccgtgatgcaatgactgcgattgaagaaggggctgcggattatgcggttcttccgattgaaaattcatctgcaggtccggtgaacgagatgtatgatcttctggatgaatttgagaattatattgttgctgagacgatccttccggtagtgcatactttgtcaggacttccgggaacaacacttacagatatcaaacgtgtttattcgaaagcagaagcccttatgcagacgacagggtttttgaatgaccatgcagactggcagcagatcagcgtagtgaatacggcaatcgctgcgcagaaagtagtaaaagatggagataaggcacaggcagctgtatgtagtgcctatgcggcgaagattcatgggttggaagttctcgcagataatataaatgacgagccggataactgtacacgctttatcgtggtgacaaatcagaaggtttatctgaagcatgcgtcaaagatcagtattgaattcgaacttccgcatcagagtggggctcagagtgggtctctttatgatcttctgtcacattttgtatacaataatataaatatgacaaagattgaatcaagacctgtgaaaggaaaacagtgggaatatcgtttctttgtagattttgatggaagtctggaggacgcagcagtgaagaatgcattgcgtggactgagagaagaagcaacgaatttgagaattcttggaaattactagatattagaatagatagaaaagcagaatacagagcaggtggagcgaaagctccagagggatttactggaaaagaggttatttagaatgcgtacaaacgaactgatgctgtataaaaatatggaatatggagagattttaaaggatatcacattcctgattgataattatgagagtgaattttataataaagaagatttaagaggactcctttttgattgtatcaatgaacttttggaattatcagtaagccacggttttgaagggaatctgtggcatacttatctgacatttcttcttgcaagtgatgagaatgcatacagcacttcctgtgagatcgtaggagagattgaaggtagtctgaatgagattgcacttcatgatttcgctatttttaaggaaatgtttgactatgatttcgaggaactggaaaagagtctggacgctgactgcctgaagatcatcatggattataagagcggtaacagtggcggtaaagtgttcaaccgtcgtgtcagggatagaatctgtgatctcagccgtgcccttgccgcgacgcagaacgtagatcatttcaagcgtacactgacgcagttttataaggaatttggagttggtaaacttggacttcacaaggcatttcgtgtggagcatccggagaattctgatgtggagatcataccgatcacaaacattgcacatgtacatctcgatgatcttgtaggttatgaagatgcaaagaaaaagctggttgataacacgaaagcatttgtagaaggaaagaaagcaaataactgtctgatgttcggagatgccggaacaggaaaatcttcctcgatcaaggctattttaaatcagtattatgaccagggacttcgtatgatcgaggtgtataaacaccagttccaggatctgaatgatgtaatcgctcagattaagaatagaaattataaattcattatttatatggatgatctttcttttgaagaatttgaaattgaatacaaatatttgaaggcagtaatcgaaggtggtctggagaagaaaccgaagaatgtgttgatctatgcgacatcaaaccgccgtcatctgatccgtgagacattccgtgataagcaggacagagatgaagatatgcatacaaatgatacagtacaggagaagctgtcattggttgcaagatttggcgttacgatttatttcggttcaccggataagaaggcattccaggagatcgtgcgtgtacttgcgaaaaagaatggaatcaatatgccggaagagcagctgcttcttgaggcgaatgcatgggaactgtctcatggcggtttgtctggaagaacagcacagcagtttattgattatctggcaggacgggagtaatgcattgtgtggaaggcttttagagtcaaacagagcttggaaaatggaataacagaagaaaaaaacaagagtggatttcgcaaaaagatgatatctgtacagttactgatcgtacttgttgcggttatgctgttttgttctggatgtgccgggaagatgaatgcaaagaagatttttcgtcagtcttcggaaaatatgcagaaagtaacttcttcagcaaaccatgtggaactggcaattcagatgtctgatattttaaatctgatggaagtaaacatggagatggatctggagaacacgacagagcctccggctggtcatgcgaaaggaactgccagggtgacgatcaaagattctgaggtatctgcagatctggaactttatcaggtagaggaagacggaaaacaagtgacatatagtggcacgaatggatcctggaagaaagagagtgcagaaggaagcagcgagaatcaccttggtattgacggaaatattttcgcgcaggaagggaaagcgcttgagtctttccacctgtccgagcaggagacaacagtaaatggcaaggcatgttatcagttgtatggcaatgtaacaggaacggagcttatgggtcttcttggcaaagagatggtagaagcatatcatctggtgaatctcccggaggaggatgcaatccgcaatttgaaaatccctgttatttttgacatttacaaagaagaactgcttccggcgaagatcgttgtagacatgagtgatgtaatgggagatttatataagtcttacggagagactacgaaagtaaatctttactcgatcgtgcttcagtttacggactataacaaggtggatgaaatccatgttccggatgaaataaagaattctgcgaaataaaagaaacattgccagaaatcctatggttgatgctatataaaaagaaggaagcttcaggccgggcacatgccgctgaagtcttccttctttttgttattaccacttatttcatattatacaggtttcatattactcaagttcttctatattgctgatatcgctgtcaatcaccatggagtaatttgtataatagacgacaaatccaggtttcccaccatttggttttttgacctgttttttctccacgtagtcaatctcaactttatcggagccacgcatgctggaataataagctgcaagtctggctgcttcttcgaatgtacggtccggaagttcatccccatgtgttttgacaatgacatgggatcctggagcttgttttgcatggaaccaccagtcatttccgactgcaaagtggaatgtcagttcttcattctgaagattgttctttccgacatacatatgataaccgtcactggaaatgtaatggagtggtttgtttttgatcttgacttttttctttgtgtattttctgcggatataaccggagtttgtgagctcttctttgatttcagcaagatcatcttctgtcagtgcaatatcaagtgccgtctgaatggattccagataagtgatctcatccaatgtctctttgcaaagaacagaaagtgcttcaaaagtacgtttttgcttgttgtattttgcaaaataacgctgggaattctcctgcggtgtctttaatggatccatcggaatggataccatttcattggtgtaataattcaggcattcaagagtctttgcgccttcctccagattgtatccataagtgttgatcaattcgccgtacactttatatttttcacgattttctgtgtctctcaactgacgcagctgcaagtcatattttttccggtttcgttctaatgcagtctgaactacgtgacgcaaatcaaccgatttctgtcggatgcgggtaatgagactgcgtgtcgaataataagtctcaagtacttcggaaacagaatcatattctacccttgtatagttgacaaaatgactcagtggaagagcagagaattcttttggctcttttccatcgaaataaataccaggtgaaaagctatcttctttgatcgcggataaataaatctcaaactgtgtatatagatgaagtaaaatatcagcagaatactcctgggccgggacagaagaatccattcctgcaagggagcagatctcctctgcggttacaggactgattccggtaaaacttgtataaattgctttggcaagtggcattggcttacctgtcagatgcgctgcgaattcttcagaagttaccgtgagcggatctgctttctgcatggtgtccgggatgaaatactctcttcccggaagaacttcccggacagaactcatctgtgcagatacatgtttgatactgtcaatgatcttaccctgatcgttacagaaaatgatattgctgtgttttcccatgatctcgacgatcagatctttccggcagaggtcaccaagttcatcgagatgttcaattgtaaaatgaataatacgctcaagtcccggctgccagatatcaacaatgcggccgccgctgatatgtttacgaagaagcatacagaagtttggggcagtcatcggacttggcttattcttcgaggtcagatagaccagcggaagagaagcattcgccgaaatcgacagacgatactgaccttccgttgatttgactgtcagaagaagctcatccgcttccggttgtgcaatctttgaaattcttccgtttaataatttatgttttaattcgctggcgagactcgccacaacgattccatcaaaagccatattgtttcctcctgaataaaaggtttgttttcacatttttttattgtaacataaatcgaatctttataaaagacttgttgaccatttacaaacatttgatgtataatagattagattatagtaaacagaggatgaagacaatgatcaaaagtatgacaggctttggcagatgtgagattcagcaggattccaagaagtttaccgttgagttaaagagtgtaaaccaccgttatcttgatgtgaacatcagaatgccgaagaaacttaatttttttgaaacatccatccggacacttctgaagtcttatgcgaaccgcgggaaagttgatatctttattacatatgaagatctgtcacaggcgcagagctctgtgaaatataatccattgatcgcggcagaatatatgaagtattttaagcagatggaagaagaattcgggctggaaaatgacatcagcgtatctgcacttgcgagatttccggaagttcttacgatggaagagcaagtggaagatgaagaggagctttggaatggactgaagaaagcactggaaggggcttttacacagtttgttgagacgagaataacagagggtgagaacctgaagaaagatattcttgcgaagcttacatttctggagcaggaagtcgctgcggtagaagaacgttctccacagattgtggcagaataccgacagaagctggaagagaaagtgactgagttgctggcagatacacagatggaagaaaaccgcctggcagcagaagtgattctgtatgcagataagatctgtacagatgaggaagttgtgcggttgaagagccatattcagcatatgagagcaacattggaggagaaagaaggaatcgggcgtaagctggatttcattgcgcaggagatgaatcgcgaagcaaatacgattttgtctaaagcgaatgatatcgaggtttccaatcatgcgatcagtctgaagacagagatcgagaagatcagagagcagatacagaatatagaatagagtaaaagagggcaggatcatgaataagaaaggtattttgattgtcgtatccggattctcaggagccggaaaaggtacattgatgaaagaattaatgagaaaatatccggagaattatgctttatccatctctgcgacaacaagaggtccacgtgacggggaagtagatggcagagaatatttcttcctttccagggagaaatttgaaaaaatgattgccaataatgaattgatagagtatgctaaatacgtggaaaactattatggcacaccgcgtgcatatgttgagaagatgttggatgaagggaaagatgtgattcttgagatcgagattcagggagcactgaaagtgaaagaaaagttcccggatacgcttctgatgtttgtgacaccgccgaatgccagagaactgaagtcccgtctggtaggaagagggacagagacgatggaggttattgagtccagaatgaaccgtgcctgtgaagaggcagagggaatgagtgcttatgactatcttgtcgtgaatgatgaactggatgattgtgttgaagagatgcattctattatccagggagaacaccacagaagttcacgcaatgtgaattttatgaatgacataaaagaagaattggaagagttgaaaggagaaaattaatatgctgcatccatcttatactgacttgatgaaagtagttaacaaagacgttgaagagggagattctaaggttgtaaacagccgttattctatcgtaatggctacatctaagcgtgcaagacagctgatcgccggagaacttccgcttgtacctgtgaaagacggacagaagccgctttccattgcaatcgaagaactgaatgaaggtgagcttaagatcttacctgaggacactgacgaagagtagaatcagaacagtaacggagcagatgcagaaaagtgcaatctgctcttttgacgttgttgttgaacgttttgtacatgcatggaatgtatgaaatgatgcacagaaggtgagatttatttatattttttagagaggatgaccaggaggttttactaatatatgaagatactttttatatccttaggatgtgataaaaatctggtggatacagaagtaatgcttggaatgcttgcttcaagaggttacgagatgacgaatgatgaacaggaggctgatattattgtgatcaacacctgttgttttatccatgatgcgaaagaggaaagcatccagaatattcttgagatggcagaatataagaagaatggcagtgcaaaggcattgatcgttacaggatgtatggcagagcgctatcgtcaggagattcttgatgagattccggaggtagatgaagttcttggaacaactgcatatgatcgcattctggatgcggtagatgcggcacttgcaggacaacatgaagttatgacagctgaccttgatgctcttccattaccggagacgaagcgtcttgtaacaacaggaggacattttgcatatctgaagatcgcagaaggatgtgacaaacattgtacgtactgcatcattccgaaaatccgtggaaactttagaagtgtaccgatggaacgccttctgaaagaagcacaggatctggcagagcagggcgtaaaagaattgattcttgttgctcaggagacaacgctttatggaaaagatctttatggagagaaatctcttccaaagctgctccgtgaactttgcaagatcagtggaatccgttggatccgtattttatattgttatccggaggaaatcacagatgaactgatccaggtaatgaaagaagaaccgaagatctgtcattatcttgatctcccaatccagcatgcgaatgataccatcttgaagagaatgggacgcagaacttcaaaacaggagctgatcaacattgtgcagaagcttcgtaaggaaatcccggatatctgtcttagaacaacactgatcacaggctttccgggagagacgcaggagcagcatgaagaggtgatggaattcattgacacacttgagtttgatcgtcttggagcatttacgtattctccggaggaagatacaccggcagccacattcgaagatcagattgatgaagaagtgaaagaggatcgtcaggcagatatcatggaacttcagcaggaaattgcattcgataaagcggaagacatgattggaagagaagttcttgtcatgatcgaaggtaaagtcgcagatgagaatgcctacgttggaagaacttatcgtgatgcaccgaatgtagacggcctgatctttatcaatactgacgtagaattgatttccggagattttgcaaaggttaaagtgaccggagcattagattatgatttgataggagagttgatgtagtatgaatttaccaaacaaattaacagtattacgtgtgattatggttccgttttttgttttctttatgttgacagatgtaggcggagctgcgaataaatggatcgcgcttgtactttttattgttgcaagtctgacagatatgctggatggtaagattgcaagaaaatacaatcttgtaacaaattttggaaagtttatggatccgctggcagataaacttcttgtctgctcagcaatgatctgtctgattccttcaggaaaacttccgatagcagttgttattgttattattgcaagagagtttattatcagtggtttccgtctggtagcatctgataatggcgttgttatcgcagcaaattactggggaaaattcaagacagtatcccagatggcaatgatcattgttctgattgctgattttggcggtgtattcgacatggttggaacagtactgatctggattgccacagcacttactgtgatttctctggtagactatgtgtgggcaaacagagaggttcttacaaagggaggcatgtaagagatgtatctggagtggttttttaaagagaaagctgcaggtgagaaaagtctggaagaagttgtagtagatcttcttgcagagcgtaaacttcatgtgacaacagcagaatcctgtacaggtggattgattgcaggaacgttagtcaatgtggcaggagcatcagatgtgctgaacgagggatatgttacgtattcgaatgaggcaaaggaacgtctaattcacgtttctcatgagacacttgaaacttacggtgccgtgagtgaacagacagcgcatgagatggctgagggtgctgcaaaggctgcgaatgcggatgcggcactaagtgcaacaggaattgcagggcctggaggtggaacagaagaaaagccggttggtcttgtatatattggatgttatctgaatgggaagacgacagtgaaagagtgtcgttggaatggaagccggatggagaacagactggatactgtgaaagcagcattggagatgctgaaggaacgtctggtggaagagatgccggtgtaataagaaaagattaagttgaagcagtaactgtttccaaaaggatacaggagctgctttttttatacataaatttgtcaagtgtcatatttatataattctttccctcagatggtgaaaatcttgtcaaagttgtgattgacgaatgcgacaaattgtgcgaaaataaatacatatggtgcagggagaaagagtttgtggcaggtgacaaatcaacttctcaccgcgcagacagttcagtgttaaaaaataatgcagagctgtcagtttttgtgcgaaaaaaatagtgtaccgtatacgaagaaaatcatacatattgaaaggagtattaacatgatttattcacacgaagtagaaatgatgtgtccggtagcccagggcgtaaaccatggcgcagctccaattccagaagaagctaaatgggtaaaggcaaaagaaatcaaagatatctccggacttacacacggtgtaggctggtgtgctccacagcagggtacttgtaagctcacactgaacgtaaaagacggaatcatccaggaggcacttgttgagacaatcggatgttcaggaatgacacattctgcagctatggcttctgagatccttccgggaagaacacttcttgaagctctgaatacagaccttgtatgtgatgctatcaacacagctatgagagaactgttccttcagattgtttacggaagaactcagagtgcattctcagaggacggacttccggtaggagcaggacttgaggaccttggaaaaggacttcgttcacaggttggtacaatgtacggaacactgaaaaaaggacctcgttatcttgagatgacagatggttatgtaacaggaatcgcactgaacgaagatgacgagatcatcggatatcagtttgtaaacttcggtaagatgatggacttcatcaaagctggagacgagccggctgtagcgcttgagaaagctaaaggacagtacggacgtgttgacgatgctgttaagatcattgacccaagaaaagagtaaggaggactatttcaatggcattatttgaatcatatgaaagaagagaaaaacagattcttgcaaaactcgctgagtatggaatcaactccatcgaagaagctgcagaagtaactaaagcagctggtcttgacgtttacaagatggttgaaggaattcagccaatctgtttcgagaacgctaagtgggcttacacagtaggtgctgctatcgcaatcaaaaagggatgtacaaaggcagctgatgcagcagcagcaatcggagaaggacttcagtctttctgtattccgggatctgttgcagatcagagaaaagttggtcttggacatggtaaccttggaaaaatgcttcttgaagaagatacagagtgcttcgcattcctggctggacacgagtcattcgcagcagctgagggtgctatcggtatcgctgagaaagcaaacaaagttcgtaaaaaacctctgcgtgttatcctgaacggtcttggaaaagacgctgctcagatcatcgcacgtatcaacggatttacatatgttgagacagagcttgactatcacacaggagaactgaaagaagtattccgtaaagcatactctgaaggacttcgtgcgaaagttaactgctacggagctaacgacgtagtagaaggtgttaagatcatgtggaaagagaatgtagacgtatctatcacaggtaactctacaaaccctacaagattccagcacccagtagcaggaacatataagaaagagcgtatcgaagctggaaagaaatacttctcagttgcttcaggtggtggtacaggacgtacacttcacccagacaacatggcagctggaccggcttcttacggaatgacagatacaatgggacgtatgcactctgatgcacagttcgctggatcttcatctgtaccggctcacgttgagatgatgggacttatcggagcaggaaacaacccgatggttggtatgactgttgctgtagcagttgctgtagaagaagctgcaaaggctggtaaattctaagaatagacaaaaatagtcaaatataaccaaaaaaattaggaggtaaacacaattatttatgaatacctccttttttattacattgaccacaaatcatacacagtgctttgcccacactttgcccacacaaaaactaacttgtgggcaaatatagatggctatattatcataaattgattattttttataaataaaagatatgcctgtatggatgatggcttttaaaagagcagaagagtattgttctgattatgatttcggaagatttttgatcgcatttaatgatatgaaagaaatattttaatccataaatattacccacaaaaaactgtcttatttcaagatagtttgttataataataaaacaatgagttatataggataataaaggaatataagaattaatgattacgaacagtattcattttcagaaatagttaaagtttgaatatatgacgattttgaaattaattttactacaatctagaaaaaacgaggcatcacacatgaagataaagatggtagacattgcaaggcatctcggagtttccaaagcgacagtttcgcttgcagtaaacggaaagccgggagtcaatgaagaaaccagaagaatggttttggaatgtctggaagaaatgaagaagaataacggagtgattccggtaaaagagaatatcgttacagtgtctggccatccggtgaatcagatgatcaaaatagtgatcgttaatcacagcaaaggtgctgcgtgtaattcagaaacagatctctggtcagatgtacttgctacatttgattctgaagcaagaagacttggatatctttatggagtgacgtatttaaatgatgacattgcgcaaatagaagcagtaattacggaatgtaatatggattttgtggcaggcgttcttctttttggaaccgaattaaaagaagaagatcaaaacctgcttgaaagaatcaaaaaaccattggttctttatgactgtgaacttccagatagtcggtatagcagcgtatgtgcagacaatagacaaatgctaaaaagtgctgtggattatctgtacaaggaaggtgcatcagatatttattatttctgcacagggaaagataattataattatcgagttcgtaaagaagcatttttaaatacaaagtctaacgaagatactgcatctgcaaaacatattcttgatcttggagatgaaattccaaagataacggagactttgttagactggttgagaaaaaatccgcttccgcaaggaattttatttgaaaatcaacagatttcaatcggtgcgttgacggctcttcgaaagtatggagtgaacatcccacaggaagtgaaagttgtcggatttggtatgattcctgactatatataccaggatctaaagttggtacaaatgagaatatctgaaatagaaggtgttcttcttacaatggatttactggataaaaagattcgtcagtactcaatgtctaaagttaagatatacacagaagcagaaatgattataagttaaaataatcgtaagacaaaagaacgaaaaaaaaacaaattggaggaacagaaaatgaatgaatattttccacatttatttgaaccaattaagattggtaagacaacggtaaagaacagaatctttatgccgccgatttccacaaacatggcagataaaggctatgtgacagatgcgttggttgagcattattcagccagagcgaagggcggagttggactgatcgttacagaagttacgacagtagagccggtatatacatacttgccgggagatatgtcaatctatgatgattcttatattccgggatggaagaaactggtagatgcagtgcatcagtatgatacgaagatcttagcacagctatttcatccggcttatatggcatttccaattccgggaacacctcagctgatcgcaccgtccaatgtcggtccttattatgcaaaatcagcaccgagagcagtaacagtagaagaactgcatgtacttgttcagcagtttggagaggctgcacgccgtttccagatcgcaggcggagacggagtcgagatccagtgtgcacatgcgcatggactgctcggtggattccttacaccactttataataagagaacagatgagtacggcggagacattaacggacgtctcagactgacacttgaagtaattgcaaagatccgtgaactttgtggtgatgatttcattattgatgttcgtatttcaggagatgagtacagtgaaggtggtctgacactgaacgacatgatctatgtatccaaacagcttgagaaaacaggtgttgatttcatccatgtttccggaggaaatacaatcaagagaggaagctccatgcctgcacctggtacatcaccggcaccgcatgcacacgcaagtgaggagatcagaaagcatgtgaatattccggtatctacagttgcaagaatcaatgagccatggatagcggaagaacttatcgcaaacggaaagacagatatctgtatgatcggtcggccgaacctgtgtgacagtgaatttgttaataaagctgcagaaggaaaaacagatgatatccgtccatgtatcggatgtggacgctgcctgacaggaattatgtttggtaatccgatcagctgtacagtgaatccatctgtagagtctgacgagatcaaagaagcagatgagaagaagaaagttcttgtaatcggtgcaggtccagcaggaatggaagcagcttacgttgctaagaaacgcggacatgaggttgttctctgcgaaaagagtggtgagttcggaggactcttaagacttgcagcagttccaatcgccaagcaggaactttgtaaagtaatcaaattcatggcacgtcgtctgaaaaacgaaggaattgaagttcgtatgaactgcgaagtaacaccggaaatgcttgcgggagaatttaaggattatgaggttgtctgttctacaggagcagttccgaaggaaatccctccattcaaagtatttaagcagacaatgacagccgatgacgttcttgcaggaagaaaatatccgggaagaaagattgttattcttggtggtggatctgttggatgtgagacagcagattatcttgcaccactgattgatgacatgttccctgcaaaccgtgacattacagtgatcgagatgacgccatcattgatgccgggtgaaggcggagcagctaagagtcagctgacaatgagactcaagagaaaaggtgtaaagattgaactgaacagtcaggtgacgaaggttgatgagactacgatcacttatgagaaagacggacaggaatatcatatcacagatgcggatacactgatctttgcagtcggttatgcaccgaacaaggtagagactacagaagagagagttcattttatcggagactgtgataaagtcggaactctgaaagatgcaattgcggcaggacataaacttgcagaagaactgtaattgaaaaaaggagaaaaaagatggggaataaattatcagaaccaattaaagttggaaatcttacttttaaaaacagaatcatgtttccaccgcttacaacaggatatgaagaaagagacggatctattggggagagaagtctgaatttctatgaaagacttgcgaaaggtggagtggcgtatgttgttatcggagatgtagctcctgtaagaacagcttcaccgacaccaaagctttatgatgacagccagattccagtatataaaaatctggcagacacattacataagtatgactgtaagcttgcacttcagttattccatccggagtatgatgttcctggagttggacgcatgatcatggaggcaggtattgcaagacaggctgcggcaaaagcacaggcagagggaaatgcagaagaagcaaagaaacagatggaagaatgcgacagacttacgaaaggcgcttatgcaaaacttcatcatgatatgcagcattttgtaacagaggcaacggttgagcagttagaagatattaaaaacagtatcgctgcatgtgcagcaaaggcgcaaaaagcaggaatcgatgcgattgaagtacatggagatcgtcttcttggttccctttgttcaaaaattctgaaccatagagaagatcagtatggaggaagtcttgagaaccgtacaagatatgcactcgaagtagtagcagcaatcaaagaagctgcaccagatcttatgattgagtataaactgccaatcattacagtaaatcctgatggatcacttcgtggaaaaggcggacttgaggcagaagaaggaatccggtttgcaaagatgcttgatgaggctggaatcgatatgattcaggttgctcaggcgaaccatacaggaaacatgggagatacaattccgccaatgggagatgttccatataactggactcttccggttgccagagaagtgaaaaaactggtatctgttccggttgcaacagttggtcgtgttgtcagcttagaagcaggagagaagatcctcgaagacggagatgccgatatcgtagcttatggacgttccatgcttgcagatgcagatattgccaataaagctatatccggagagtgcatcagagaatgcttgaactgtaataaaggatgcgtagatgcaattcagggacgtaaatacatttcctgcgtattaaatgcagagaacggaaacgaaggaactatatttatcaaacctgcagacgagaagaaaaaggttgcagttgtaggtgccggaatcgccggacttgaggcagcaagagttgcagcaaaacgtggacatgaagtaaccgtatttgagaaatcagataagattggtggacagattcatttggcagcagttccgccaagaaagagcgagattttaagatctattgaatattatgagaagattctaccagaactttctatagatgtgaaattaaatacagaagcagattgtgaagagctgaataagtttgatcatgtaattcttgccatcggtgcgcataacatggatcttccaatgtctgttacagacagcaatgttgtttctgcctgggatgttcttgcaggatgcgaagtgagtggagcatgtgcagtacttggcggaggattagttggaactgaaacagcagaattccttgcacagaaaggtctcaaagtaagcattgtcgagatgctggatcagattgcaacaggagaatccgaaacagtaatgccactgatcaaaaaagactttgaagaacacgatgtaaaagagtatgtgaatacaagagtgaattccatcgagaataatgtgattcatgctgtgaatacaaaagacgagtcagaggttacaattgaagctgatacaattgtgaatgcactcgggtctaagaagaatctctttgacgacagtaagctgacagttccatttgtatatgttggagactgcagcggtgagagaacagcagatatctcagcagcaatccgcagcggatatcaggctggaaatgaaatctgagaatttttaaattttattcagtaagaaaataagtaaaatatagggtgatgctgtaaacagaaaatctgtagacagtatcaccctgtttcagttataataaaataaaatttttgttataaaaaatgataatggagcaagactatgataaacaaagaactattttataaagtaacattaattgattgtaacggaaaagaattggaagttgctaaatttctgcagattttaacaggaatggaaaaaacagaaacaagaagaattgtagcaagtttgccgtgtgttttgtatgaagagcttgacggagaggcgtgttcttatattgaggaggcactggatttctatacagcaaaatataagtttgaaccagtcggtgatgaaaaagaagtgtatgaagtagatccatcggtgtatccttcaaaacaggtgatcgcgcttggaagtatggttgattacatcggaaagaggtcagagtttgtaagcatcgcgagaaaatatgacttcacaaagaatgtgagcctgaatgatacgccattcttagtaaaagatggtttggcagaagaacaggcagtgaacctgcggcaggatcttcgcaatatgggaatgtttgcgctgattatgagaagtggggcagaagttcagcaggtgaagaagaggggatttttagcaggggtgtttgcacgttgagatgaataaaagggttgtttgatacagacagctgtgagtagtgattatatagctgatttcttacagaaaattcaattggattttattgacacttttgctgagaaggactacaatatctttagattgttaatttaataacatataaataaggagtttaggaggcagacaaaaatggcaaatattttatgtagtccaagcaaatatgttcaaggtgcaggtgagatgaaaaagctgggtgaatatgctcagaagtatggtaaaaaagcacttgtactgatcacagagtcggggtataaacgtattgaagacgttctcaaagttggatttgaaggatatgatattgaaccagtgtatgagtatttcaacagagaatgtagcaagacagaaattaatcgtttggtagccgttatgaatgaaaagggctgtgatgttgttattggtattggcggaggaaagatccttgatactgcgaaagcagttgcttattacaaagaagtgccggtactgatctgtccgacaattgcatctacagatgcgccatgcagtgcactttctgttatttatactgatgaaggcgtattcgaagaatacttattcctcccagctaatccaaacatggttctgatggacacagaaatcattgcaaaatcaccagtcagactgacagtttccggaatgggtgatgcacttgcaacttattttgaagcaagagcctgtcaggctagcgaagcaacaacttgtgctggtggaaatgttactatggcagcgatgtcactcgcaaaactgtgctttgatacattgatgaatgaaggtgtgaaggcaaaacttgctttggaagcaggagcctgcacaaaagctgttgagaaggtaattgaagctaatacattgcttagtggaatcggatttgagagtggcggtcttgcaggagcacatgcaatccataatggattcacagttttggacgagtgtcatcatatgtatcatggagagaaagttgcatttggaacaatcacacagcttgttctggaagacattccggcagaagaactggaagacattatagattggtgcattgaactgggacttcctgttacattaaaagaacttggtattacagaagtgacagacgagaagcttatggcagttgcgacagcagcctgtgcagagaatgatacacttcataacatgccatttgaggtgacacctgagactgtatgcgcagcaattaaggcagcagatgcttacggaagatatttcctgggagaatagaatatgggaaataggacaccatttcgctaaaatagaaaaaccaatttgacaaactgattttctgtggtataattttcatgctgtgaaaaacagccgacagttcatttgtaccttcctgtcgaaaaacaaaaccagggctagttaaaaagattctaggctctgcgtgcaaagaagtacgcagagctttttatattcaggaaatatttttcaatctatataaaacgcttcgcttaggattcacagctcttaaaggtacatacatttcacatacaggagagttgaaatatgtattatttgcaaacaaaagccagttttgacgcagcacattttctatggaaatacgaaggaaaatgcagaaatatccacggacatcgttggaatgttgttgcaaaaatcaaaagtcaggagctggagcaagaaggacagacacggggaatggtagtggactttggtaatctgaaaaaggatctgaaaaagctttgtgattcctttgaccatagtctgatttacgaagtgggatctctgaaagcagaaacagtagctgcacttcagaatgaggactttcatttggagaaagtttcctttcgtcccacagcagaaaattttgcatattatttctacaaaaaattaacggaacttggatacggggttcattgtgtggaagtatatgagacaccgaataattgcgcggtttatgaggaagagtagatgaaagtagtagaaaaattcaccagtattaatggggaaggcagacgggctggagaattggcagtctttgttcgtttcaaaggatgcaatctgcgatgcagttattgtgatactatgtgggccaatgaacctgattgccaatataaagaggaaaccccggaagagattttaaattatgttttaggaaccggaattcacaatgtgacacttacaggtggagaaccgttactgcaaaaagacatcagagaattgatccaccttcttttacaagccggtttacaagtcgaaattgagacaaatggcgcagttgatttatctgcattttgtgaagaacgaccggtatttacaatggattataagttaccgtcaagcgggtgcgaagaatatatgataacagagaacatggaactgctaggaaaggatgatactgtaaaatttgtatgtggcagccagaaagatctgttaaaagcactggacgtgattcagacttataatctgacaaacaggtgtcatgtgtatcttagtcctgtttttggatctatagaaccagtgcagattgtagaatttatgctgaaacatcgattgaatggtgtgcgtctgcagattcagatgcataaagtgatctgggatccaaatgaacggggcgtataaataagtagtgaggtgatggagatgaaagcattagttctctttagtggaggaattgattcaacaacggcattaggactggcaatcaaaaagtacgggaaagagcaggtgattgcactctcggtttcctatggacagaagcacgataaagaaatcagggctgcaatagcagttgccgaatattatggtgtggagcatctgttcctggatttaagcaaaatatttcaatatagcaattgttcactgcttcaacagtccacggaagaaattccggaggagagttacgcagagcagatttcaaaaacaaatggcgataagcctgtaagcacatatgtaccgttccgaaatgggttatttctttcttcggcagcaagtatcgcactgagcaaggaatgtggagtgatttattatggagctcatgcagatgattctgccggttttgcttatccggattgctcaccggtattcaatcaggcgatgaatgaagcaatctgggaaggctccggacatcagctgaaaatagaagctccttttgtaaatgtatccaaagccgaagtagtacggattggattagaactgggagttccgtatgagttgacatggtcctgttacgaagggggagagaagccttgcggaaaatgcggaacatgcattgatcgcgcagcagcatttcaggcgaatcacgtagaagaccctgcgttgagatagaggagaaagcaatgagagaaaaagaaaatttaacattattgggaaatcagcaaacagaataccgtatggattatgatccgtctgtattggaggcatttcagaataaacatcctgaaaacgattacttcgtcaagttcaattgcccggaattcacaagtctgtgcccaatcaccggacagccagattttgcaacgatcacgatttcctatgttccggacgaacgtcttgtggagagtaaatccttgaaattgtatttgttctcattccgaaaccatggagattttcatgaagatgtgatcaatataattatgaaagatcttgtcaagcttcttgaaccaaaatatatagaagtctggggaaaattccttccacgtggaggtttgtccatcgatccgtattgtaattatggaaagccaggtaccaactgggagcaggttgcctggaatcgtatgagtaatcatgatatgtttccggagaaaattgataatcggtaagataacggtagtgtgcaacaaatagaagatggaaagaaattttcaggagatttccgcatatcggatttacaaagaacactcatcaacgtgataaattcatctttggtaatcttactgtacttctctaagcatttttatgttattatgaaaatagaattatcacaagagaaaatcgtgagggagaagatatatgggcacactatatacaagactatcatcaataactggtgagatgtcacctgaatcaatagaacatcatattgctcgagttatgctggaacatattcatcaattgaataacatttccataggtgctatggctgatttatgctctgtttcaaaatctacaatctccaaattcgttaagcaattaggatttgaggattacaaagaatttaaagcagaagcatacagtagagggaaaagagaagtttacataaaagatctaaatacgataaatattacagattatatattgtaaaaaggaacggaagaatatctggatgtgctgttttcagatattcgctatttatttttcaatactgactctaaaaaaatagatcacttggtcacgttgattcatgattatgaagaagtagccgcatttggagaaggatattcagagactgctgcattgaattttcaacataaaatgtctttttaccagaagttcatttacacaactacaaatgacagaaaacaagtagagtatattagtcatgcaaaagaaaatacactactgcttattttttcaaattccggaaggtatattagtgagtatacgcatctgacagatgctccatcaaagaagtgttttgaagaaacaaaagcaaaagtagttctgtttacttcaaacagagaaatggagaaagaccctcgagttgatctatgtattgattgggaatataaagatttagtccaaaaccatcctgttttatatcagctgttaattgaacgaattgcaattgcgtatcaaaataaatacggattcccaatggaaaaatgaaatcatccataatttttaagactggaaagttcgcaaaatagaaacttttcagtctttcttttttttattgttataataacaacagattcaagaaagcgtagtgaaaagatgaggaagaagaaatgaataaaatatgttttcgtgaagaagctaaagattggaatgaagcattgccgataggaaatggatttctcggagcaatggtatttggaaaaatcggaacggaacgacttcaaattaacgaagattctgtttggaccggaagttttatggaacgtgtaaatcctgatgcgcgagagaactatcccaaagttcgtgaactcttattaaatggagaaatcgaacaggccgaacttctcgcagagcgaagtatgtatgcaacatatccgcatatgcgacattatcagacacttggggacgtttggatagatttttacaaacagagaggcaaaacgatcttcaaaaaggatcaagggggacttttaagcgttcagcatgaaagcgtagaagttcaaacgtataacagagaattagatatttcaagagccgttggaaaaatccaatatgaatcggaaaaaggaaaatacgaaagagagttttttgccagcaatccagatcacataattgtatatcagatgaaatccacagatggcgaacttcttaattttgatttatctttaacaagaaaagataaccgatcaggacgtggttcatctttctgtgatggtactgaagtcctggatggcaataaaatccgtttatatgggaaacaaggtggaaatcacgggattgcatttgaattgcttgtacaggtaagaactaaaaatggcaaaatttcacgaatgggaagtcatttattagtagaggatgcaaaagaagcaacactatttatcacagcaagaacatctttccgaagtgaacatccgcttcagtggtgtatggatgtattgagtaatgctgaaaaagaatcttatggaacattacaagaacgtcatataaaggattatttatcttactatgaaaaaagtaatctgaaactgaattgtaaagattcttatgagcatctgacaacaccagaaagacttgaacaaatgcgtaatggcatagaagatattgaattaataaatacatattataattttgcgagatatcttctgatcagctctagccgtgaaggaagtcttccatcaaatctacaaggaatctggaatgaagaatttgagcctatgtggggatccaagtatacaattaatatcaatatagagatgaattactggattgctgaaaaaacagggttatctaaactccacatgcctttgttagaacatttgcaaagaatgtatccgcacggcaaagacgttgctgagaagatgtatggaattgatggattctgttgtcaccataacacagatatctggggagactgtgcacctcaggataatcatgtatcatctaccctgtggccaatgggcggtgcctggttctgtttgcatctgattgaacattataaatatacaaaagacagggagttcttgaaggaatattatggaatactgaaagatgctgttaagtttttccttcaattatgtgttatgtttggagttcattggggatttgttgcaatttctgtaaacaatcttgcaacattgggttacgatcctatcacaattgctggtcttgcatctgcatttggacaggcaggagttgttcttatgattatgcttagaacaaagaacaaaaaactgaaaagtgtttgtggaccagctattatttctgcaatggttggtattacagaaccatccatttacggtgtaacattacagttcaaaaaaccatttatgttagcttgtcttgcatctggtattggtggtgctatcatcggatttggtggagtaaaacagtatgtatatggaacaaacggaatctttggatggcttcaggtaattaatcctcagacaggttttgattcttctgttcttgctgcaattatcgcatgtgctgtaagctttatagctgcaatcattctgatgatgacagtaggaaaagattctattccagaaagcaaataatgatattcttttaagaagattttaagctctgagtgtgagaagtacgcagagctttttctatatgcaaaaagtccttagatgccacaggccttaaaaaggtacatttatcatatagataggaaagttgaaatatgtattatttacaaactaaagctagttttgatgcagatcagtattacagatggtataataaagcagacattaactaaggtattacttgtaggagagacaaaaaatgatgaattgtattatagtcggaacgggagggttcctgggagctgtagctcgttatttgattggcttaattccaatcaacccgcaaaatggttttccaataaaaaccttgttgatcaatattatcggagcatttgtgataggactcgtagtagcctttggcgcaaagaaagattggaatccacaattgatcttattcttaaaagttggaatttgcggtggatttacaacgttttcatctttcgcattagaaacaaatcagctgatggaacgaggattgggctggtgggcagcactttatgttgcattgagcgtgaccggagcaatggctgcagtatacgcatcacagtatatagtggcaagataagatttcattttgacgcgaggagagtgaccatgaaaaatcaagcatattatcatctgccaggattatttgaggtttacgaattatatcgagtatttttgtcttaataaaaaattcgagcaactaaacaagatgaatgcacagcaaaaagcaaaagtggaattcctatgcaatgaatgctgttggtttggttgtaaagatagaaaagcttgttatgaaacagttagtcggaaaaatttgggagaaaattgtcaggatcatgtctgtgtagcgccgggcgcaggagaaagctatcttttctccaaagcaatggagaaccctgggtttattagtatgactgatatccaagatatttatatgccaatgggatttcctaattttaagattgaaggacgaggacttggaagtgtactgattttggaatttctgttgtattatatgactagaccggaatatcagatccatgtcagagaagaaatatatctggataatatgttggatctttttcgaacatcggtgcgtccgaatattgacaagaaagattatatcgggtactattaagtaacgcaatgcgttatttagataggagagttaaatgatgagcagagggaaagaagtaaaagaattaagagaaaaaatgggaatgaacagacgtgagtttagcgattactatggtattccgtatcgtacagttcaggattgggaagcagagaaaagagagcttccggaatatttgttgcgtttattaaattatagagcagagatagaatgtcgaatcgaaagagtagataaatagaatagagtaactaatgactgtttgtaatcagttaagatgtaatagtttatttttttacttttagcataacgcaatgcgtatgttcggagaagggagtatttttatggataagagaataaatataatatctgattcagttggaaaacaaattgttgttattactgatatacgttttcaagggaaaagaaacattaattgggaggaagttgagaagtatctgaaggagtatataggaaattgttacgaagtagttaaaactgcagatcaaatatttataagttctgattttccaggagaattaaagggatctaaggatacgagaagattattaggagcaaatgcgaaagcaaaagcaaatgcaacacaaggaattcctatgcttcttcagtgcgcaacaaatagaagatggcaagaaaattataaaggaaaacataatgttgatgcaaaatacggttggtacagatttactacaagatttgcacttcctgtttatgatagtaatactggggaacttgaaaggtttaatattttcaggatagaaatgttgattaggcatgcaacagatggaaatctatatttgtatgatatggtaaatataaaaaaagaaacgagcaccccgcttgagcaatagctgtacggtaacaaacccatttcttacctcttatgatacattgaaaatgaaagaatgtcaataaaaaaataatctagaaaaatttttagatacacggattaacatcagcgcgtccggacatgttttttggtgttatcgtttctttcgtctgcatttaccacgtttacctccaacagatttcaatgacaaaccttcgcctatgaggtataatactaaccagagtattttgctcattacgagatgagagggagattttcaatggatacgaatgtgatcaatgaattacaaaatggtttaagtgccgcttatataaatggttctgtggcgacaaacctggcgtacaagccagcatttgtgtcgaacaatccggaagaggggaagaaggttatttcatctgtggaggatgaattaatgcgctgtgatcagtttcagattagcgttgcatttatcacaatgggtggtgtgaccccgcttcttcagacattaaaagggcttgaggaaaaaggtgtaaaaggacagattctgacgaccaattatctgaattttagtgaaccacgagcgcttgaaaaactcaatggattaaaaaatattacgttaaaaatgtatgatgtggaggctgccggaaatggtttccatacgaagggatatattttcaaaaaagaagagatttaccgtatcatcattggaagctctaatatgacaagtgcggctttgacagtaaataaagagtggaatacaaaactgatttctacagaaaatggtgaagtggctgaagaaatcgtagaagagtttcacaatctttggaacagtgaatatgccttgccttatgatgatttttatgacatttacaaagaacgttataatattataaaacatcagcgggagattgcgaaaagagaagagatcccgtcgctggaaaaatatcgattaaagccaaactccatgcaggagagatttatcgcgaatttgcgaaagattctggagcaaggagaagagagagcacttttgatctctgccacgggtacaggaaagacttatgcatcggcatttgctatgcgtgaacttggatttaaaaggattttatttttagtgcatcgagtaactcttgcaaaacaagcgaagaaatcatttgaaaaggttttcgataagaaagtcacgatgggattagtaggtgcaggctcctatgaatatgagaaagattatgtttttgcgacagtggaaacattgaatcgagatacgcatttatttcagtatcagccagatgattttgattgtattatccttgatgaggcgcatcacagttcgaacaacatttacactaaggttattcaatatttcaaaccgagattgtttctggggatgacagcgactccggataaaagggatgatgatcaggacgggaaaaatatctatgaaatcttccattatcaaattgcacatgaaatccgtttgcagcaggcaatggaggagaatcttctttgtccgttccattattttggaattaacgaggtcatttctctggatgataaagcattgcaggccgcaaagctgacaaaggaagaatttaatctgcttaccagtgatgagagagtacgacatgtaatcgaacagtcagaatattatggatatagtggtgatcgtgtaaaaggacttgttttttgtagccgagtgaaggaatgcgaagaattatcgagaaaattcaatgcattaggatatcgcacaattgctcttagtggtaatgatagtgaagaaaaacgtcaggcagcatttgaacggctggcgatggatgaggaagattcaacggaagaaatgcagccgctggattatattttctctagagatatattgaatgaaggtgtggatattgttgaggtgaatcaggttattatgcttagacctacacagtctccaatcgtatttattcagcagttgggacgaggactgagaaaggcaccaggaaaagagtatgttgttattttggatttcattggaaattataataacaattttatgataccggtggctttgtcaggggatcgttcctacaatgcagatgtgatccgtaaatatgtaattagtggaaacagcacgattccaggttcatcgacggttcattttgacgagatttccaaggataagatttttaaatcaattgataagatcaaagggatgaagactttgattaaagaaagttatatttcattgaagaatcgcttaggaagggttccgcttttatatgatttttatgagaatcaggaaattgatccactggtaatcatcagagaatataaaacctattatgcttttatgcaagcaatggaaaaggatggatataagaatagtctaagcgagcaggaaaagttgacacttgaatatttatcaaaaactgttctttcagggatacgtcccgatgaacttgcaatacttagcaaactccttcaaagtgaacagattgaacttgcagattttaaggaagagtatcgaagaacatttggatttgaaatcagtgcatcacaggtaaatgaggcagtgcaagtcttacagggacattttgttagtaaagaggcggaatataaaaaattctgtcagattgatattctagaaagtgattattccggaatgatccgaagagtgcaaagttatgcagacaggcttgcacatatacagttttatatgcaagtagaagatattataaaagtcggaatcagaagatatcaggacaaatatcttccgggaagaaagtcagataatccgtttgtattatacgaaaaatattccagaagagatgtcagtctgcttatgaattgtgggaaggatttatcttctgttatgtatggaatgaaacgaattggggatgatgttttcattttcattacctatcacaaggaagagagtcagaatgaaaaaaattatgtagatggaaaaccggattacgcggatgcatttgaagataatcagatttttaaatgggattcccagatcgggaaaggtctggatagttcttatatgcaggatgtaattggggctggaagaaaacatctgcttgtgaaaaaatcagacgcggagacgaatttctattatatgggacagtttgacatagtggatgccagaaatgcacaaaaggaagacaaccgaggacgtatgcagccaatcacgaaggttacgatgaagatgcagcatgcagtgagagaggatttattaagatatttacagtcaaatataacagcataaatgatttgaggtacgaaaaatatgaaaacgattagagtagtcgcggctattattcgtgacaaggataagatatttgcaacgcagcgtggatatggtgaatttaaagatggatgggaatttccaggcggaaaaatagaggaaggggaaacaccgcaggatgcattaaaaagagaaatcatggaagaactggacacggaaatcaaggtgggagagttgattgacactatagagtatgattacccaacttttcacctttctatggattgtttctgggcagaggttataaccggacatctggtattgaaagaagcagaagcggcaaaatggcttacgaaagagcaattggacagtgtggactggcttccggcagatgtgacattgattgataaaataaggatagaattgtaggtggcattatataaaggaagagtttactatttatcaatcacttaacaaattcaggtacaggaaagacttatggatgttaaaataattagatcgaacagaaagactgtagctattcaggtgaattctgatttgagtatcactgtaagggctccgcattttgcttcagagaaagatattgaagagattctcatgaagaaggaagcctggataagcaaacatatagaagagattaagacacgaaagaaaagatttgaatctgaaagtacagataaatttactcctgagaaaataaagctgcttgtggacaaggctcttgaggtcattccaaagaaagttgaatattttgcaaatataatgggggttacatacgggaatataaccatcagaaatcagaaaacaagatggggaagttgcagcagcaaagggaatttgaattttaactgtcttttaatgcttgcgcctcctgaggtgttggattatgttgtggttcatgaattgtgccatagaaaacagatgaatcattcgaaagcattttgggcagaggtggagaaggtgttcccagattataaaaagtcaattaagtggctgaaagaagaaggaagccagattatgtacatggtaacagaactggggaaaataccgagggatatttcaaacataaaaatgaaggatcgaaagaaatgaatcaaaatgaaacacaatgggataaactcctgaagataaagacaaccgggcgggatgattctcactcagatcagtatcgatatccttatgaaccaacgtcttatatggtattggagcgcctggcaaacagtggactgatcaggaaaaataatactctaattgactatggaaccggaaaagggcgggtatgtttttatctttcgtatcaaacaagatgcaagacaataggcgtagagtatgatgaacggatttataaaggagcagcagataataaagaagtatccgtttccgcatcacgcacagagtttgtattatgcagtgcagaaaattatgaagttccgtcggaagtggatcgctgttacttttttaatcctttttctgtagagatattacagtcagttttagcaaggatttacgaatcttattatgaaaatccgagagagatattattatttttctattatccttcagaagaatatatcagtattttaatgactcaggaacagttgattttttatgatgagattaatacttcagatctgtttccaggtgaggataatagagaaaaaatcttgatttttcaggtactttaagaatgctcaaaacatattgagcagttacaaaaagaacacccgttcgaaataatacttgcattatcgaacaactgtttgtataatggaaatatgaatacagaaattagaaatagtaattatacaacacaggaaaagctgcagattcttgctgacgcagcaaaatatgacgttgcatgcacttcaagtggatccagccgacggggaaagaaaggagagctcggcaatgcagaggcatgtggcatttgtcatagctttgcagcagacggaaggtgtatttctctgcttaagattttgatgacgaatcattgtgcctatgattgcaagtattgtattaatcgcaagagcaatgacgtaaagcgggctacatttactccggaggaaatctgtgacttaacagtagagttttataagcgtaattatatcgaaggcttgtttttaagttccggaatcttaaggaatccgacgtatacgatggagaagatgtgcgagacattattgctgcttcgcacgaaatatcatttcaatgggtacattcatatcaagacgattcccggagcttcggatgagctacttgcggcagcaggatatcttgcggatcgtatcagtgtcaaccttgaattgcccacggaagaaggattgcatacattggctccaaacaagaccatgcagaacattctgaatcctatgggtaaggtgcagagtacgattgcatctcacagaatggcaatcggaaagtcagcttatatggagcgaagtggcgggaataagtttttgaatgcaggtattttttctgatgcttcgaaaaaacatttttctgagtgcttgaatgttcagaagaaggataaagtcatttctcggaattctcagatgaatcgattagaatcttacaaaaaatacacgtcactggatcatgcacttacctgggagaatgcgaaccagttggcacctcgtgatatgtcgcgattgaagcgtagttttgctccggcaggacaaagcacgcagatgatcattggtgcgaccggtgagagtgattatacattattgcagacgacacaggcattgtatcagggctttgatctgaagcgtgtcttctattcagcatacattccattgaacgaagataatgtgttgccggagataggaacgccaccaccgcttttacgtgaacacagactgtatcaggctgattggctattgcggttctatggatttcaggcaggagaactattatcttcagaacagccgaattttaatgaaatgattgatccaaagtgtgattgggcattacgccatttggagcagttcccagtagaagtagagaaagcgagttatgcaacactgcttcgtgttccgggaatcggaccgaaatcagcaagtcgtatcacttatgcaagacgttatggcagacttgattatgcaagcctgaagaagatgggagtagtattaaagcgtgcgcattatttcatcacgtgtggtggaaaacagatgtaccatactcctattgaggcatcttatattacgcgacaactaataagtgtagacaagaaagatctatggaacacacaacatgcgaatgaatcatttactcagatgacattgacagattttggagtatgctgatgaagatatttacttgtaaagaccgtctggaagatatcatgacctgtatctatgatgcatggtctgaagctttactgattggtcatgaccagatacaattaaaaaaagagcctgtatttcagcagacgatatttgatgaatatattcatgtagaccaagatcttttcaaagcagaaaaagtgattcgctcgattcggagagatatttcggatgaagcatatctgaatatctatttggtgactttatctgtcgaggaagatgcactgcaggcaatttataatttccttcgtgtcggattcaaaattggagagagtgtactacagcaatatgcgaatccacgtgtgatgcggatattagaattgcgtcgtaaagtgtctaacgaaagccatcatttcagagagttcgcacgatttgaacgattgaattcaagtaacgtctatgtcagccatctggagccaaaaagtgatgtcataatgttggttggcagacattttgcagaccgcatgccttcagaacagtggatgatcatagatgataatcgcaaaacagcttgtgttcatccgaaagatggtgagaactatctccgatatctgacagatgaagaatttcagacattgagaaagacagaagagtacgaagatgagtatacggatctgtggaagacattctttcatgcgattgcaatagatgaacgaaagaattacgtatgtcagcgtaacttatttccactgtggaagagaaaacacgcagtggaattcaaaaaataatcttttcttatatattcttacttgtatctcatagtatggaaacgtataatgtaagaaagatgtgattgatacgtgattcttttttgatcggagacgataaaatatgccatatgatttatcaaaacctcttgtaatagggattagttcgagagctttatttaatcttgaacaggagaataaaatattcgaagaacaaggcgttgaagcatatgaggcttaccaggtagcacatgagaatgagattcttcagaaaggtgctgctttccaattaattaaagcttttctgaaactgaataacacaggattgggaagactggtggaagtgatcattatgtcacggaacaatgcaaacacatgtcttcgtatctttaattctatacagtattatggcttggatattacaagagcgactttgacaagtggagcggaaattgctccctatttaaaagcctttaagacagacttgtttttgtcagcaaattctgttgatgtacaatcggctattaacgatggaattgcagcgggtcttattttgactggagcggcacatgcggatgcaaagcaaaagatagatcagatccgtattgcttttgatggagatgcagttctcttttcagccgaatctgaaaagatttttcagaagaacggaatacaggcatttgaagaacatgagaaagcgaatgcgaacacgccgatggcaaaaggtccgtttgctaacttcctgacaaagctgtcttatgtacaacagctgtttaaagaaaaggatattcagccaatccgaaccgcactggttacatctagaaatgctccggcgcatgaacgtgcagtgaaaacgctccgcaactggggcgtatcaatcaatgaagcgttcttcttaggcggtgtcagcaagacagaagtacttgcagcatttggagcgcatatattctttgatgatcaggatatacataccgaaccggcttcaacggttgttccggcagctactgtaccttatcgtgatggagataatccaaaagaataagcaactttatattattttgaagatgatgggggaaaacgatgcagacatatacatatgtttcaaaaggaaaatttgaattaacagaaaaacctaaaccggtgattatgcatgaaagggatgcgattgtaaaggttacacttgccagtatctgttccagtgatttacatattaagcatggaagtgttcctcgtgcagttccaggaattacagttggtcatgagatggttggaattgttgaagaagttggcgaagctgtaactcatgtgaagccgggagacagagtaactgtaaatgttgagacattttgtggtgaatgttatttctgtaaaaaagggtatgtcaataactgtacggatcagaatggcggatgggctcttggatgtcgtattgatggcggtcaggctgagtatgtgcgtgtaccgttcgcagatcagggattaaataagattccggatgaagttaccgatcgacaggcattattcgttggagatgttctggctaccggttactgggcaactcgtatctctgaaatcacagaagatgatacggtgttgatcatcggtgcaggaccgactggtatctgtacattactttgtgttatgctgaagcatccgaaacacattattatgtgtgaaaaagatgaggaacgtatacattttatcaatgaacattacccagatgtacttactatttctccggaagaatgtgagacttttgttaagaatacaagcgaccacggcggtgcagatgttgtcctggaagttgcaggtgcagagtctacatttcgtttagcctgggaatgcgcaagaccgaatgcgattgtgacagttgttgcactttatgataaagcacaaagcttacctcttcctgatatgtatggcaagaatcttatctttaaaaccggtggagtggacggatgtgactgcgaagagacgttaaaactgattgccgaaggaaaaatcaatactgaaccacttatcacgcatacctatcctctcagtaagatcgaagaggcttatgatctctttgagaataagagagatggtgttataaaagtagctgttgaatgttgagatagcacaagtattcgaaaagagcgaagtgaaagtttatgcttattgtaatcttaatggattatggaaagcataatcatagtctgattggacatttgtaatttcatactcgtaataattgattttatatcataacgcttttgtttttatggcagaagcgttaattttttgcattatcacagatttatttacggttaaaatgtataaaaataaaaaaatgacaaaaaaattgatataatatataaatttttggttacttttcaaacattctgtggtaaactaatgtggtatatcaaaaaatgtgggaggagactcaaaaatgagcaaaaaagaaggaaaagggttaaagtcttttaacaagggatttcaagtgcctgacacctacatcattatctttttagtagttgttgtagcagcacttctgacatttcttgtaccaaagggattttacgaaacacaggacatttcatacatgattaatggtgttgagaaaacccgtacagtaatcaaagacggaagtttccagtatctgacagatgatgcagggaacgtagtaacagaaggagtagcactctttagtggagatggtggaacaggattcttcaactatatgtataacggaatcgtaagcagttctgcgatcgagattatcgcattccttatggtagtaggtggtgcatttggtatcatgatccgtaccggtgcgatcgaatccggattgattggattgatccgtaaggcaaagggagccgaaaaactgttgattccagtacttttcgtactgttttctcttggtggagcagttttcggaatgggagaagaagcacttccatttactatgattctttgtccattatttgtagcagttggatatgactccgttattgcagttcttgttacttatgttgcaacacagatcggtttcggttcatcctggatgaatccattctctgtaggtattgcacagggtattgcagggattgacgtattctcaggagcaggattccgtatggtaatgtgggtagtatttacagctcttggctgtggaatgacgatgttctatgcggcaaagatcaaaaaggctccgacaatctcaatcgcatatgagacggatgcgtatttccgtgaacagaacgaaaaaacaggtattgacgaaggacattcctttggtcttggacacattttagttcttctgacactggctgctaccgtagtctgggtgatctggggagttatgactcagggatattacatgccagagatcgcgacacagttctttattatgggaattgtttccggcgtgatcggagttatctttaagctgaacgatatgagattgaatgatattgcaacttctttcaaagatggagcaaaagatctgatcggtgcagcgcttgttgttgctatggctcagggtatcatgcaggttcttggtggatctgatccgactacacctacagttatcaacacaattatgtataatatttcaaatgcactgtcaggagtatccggagcagttgcagcagtacttatgtatctgttccagtccgtattcaacttctttgttgtatccggaacaggacaggctgcgatcacaatgccgattatggctccactgtcagacctgttaggtgtatcacgtcagacagctgtagttgcattccagcttggtgatgcatttacaaacctgatcgttcctacatcaggatgtctgatcggatctcttgcaattgctaagatcgagtggtctaactggatcaaattcatgtggaaattcctcggcgtattgatgattggtgcaattattacagttctgatcgctgtcggaattggattctaaaacaggcatttgataattgaaagtgatttaagatgaaattaattcagagtattgatgtttatgccccacagcatctggggaaaaaagatgtattgacgatcaatgacaagattgtcaagattaaagatgcaggttctatgtcagcagacggatttctttctgatgcagaagtgatcgatggagaggggttacttttaactccgggattcattgatagtcatgttcatgtactcggaggcggtggcgaaggtggattcgccaaccgtactccagaagcaactatagaaggacttacgaagtttggagtaacaacagttgttggctgccttggaacagatggaatcggtcgtgatatgtgtgcactggttgcaaagacaaaaggcttgaatgagcaggggatgtctgcatattgctatacaggtagttatcagattccggtccgcacactgacggatagtattgtaaaagacattatgatgattcaggaaattgttggaacaggagaaatcgcaatttctgatcatcgttcttcacagccgacttttgaagaatttgcacgtgtcgttgctgatacaagacttggtggcgttctttccgggaaagctggtattgtaaatgttcatcttggcgacagtccgagatgcttagatcttattgaacgggtggtagatgagacagagataccggcttctcaaatacttccaacacatatcaaccggaatgagatgcttttctgtaagtcaattgagtatgcattgaagggtggagcagtagattttaccggaaatgaagatattgactattgggaaactatctgtgatgaagtacgtgtatgcaatggtatcaaacgtatgttggatgcaggagtaaatcctgatcgtatgacaatttcctccgatggacagggaagccttccgatgtacagtagtgatggtgaattccttggaatgggcgttggacagtccagctgccttctgaaagaagtaaaggaatgtgtattcaaaacaaaaattccattagaaatagctatttctacgattacatctaatccggcagagattcttcgcctcaaaggaaaaggtaagattgaagaaggctatgatgcggatctttgtattcttgatcaggaacttcagcttgttgaagtgattgcaaaaggcaacacagtttataaaaaataaaggtaactgttcagagccaacctccaaaatgctacgcatttcggaggtgtggcgtatccgccaaataaaatttcaaaaacggtctaaaaaatgcaagcattttatacctttttttgaaattttgcttggctctgaacagttacaaataaagtatcttgatgtcagaagcatcagtcattcagttggctggtgcttttttcaacattaaatttatttttcagagcactttatgatataatggactcgtagtcttttacagacataagaacggatataaggagaatgtactattgatcaatcagacagcaaagaaaattttgaaagcattatcttttgatggagtagaagtggaagcatttcgtcatatggcggatttaaaacgactggatccaatgaagattttttataagaaagtagacgagaaaatatataacggaagtcatgcagttccgattcgaatattttttccaagcgagaaaagctttcgagaaattgaagaaaagaagcatgatattcaggataaaaaattgcttttgttcatacatggcggtggatgggttacagaaagtattgataattatgaaagaatttgcgctcggcttgcggatgcaaccggacaatatgtagttgcagttgaatacagactggcaccggaagataaattcccggcaggtctggaagattgttatgctgttgcaaaagcggtatattctggagattttatgttaaatataagaccagaaaacattactttgatcggagacagtgccggtggaaatctctgtgcagcattatctttgatggcaagagaccgcggagaattcatgccaaacagacagattctgatctatccggctacctataatgattatacagagaattcaccatttgtatctgttaaggaaaatggatccgattatcttttgactgccggaaaaatgcaggattatattgatctttatgcgagaaatgaggaggataagaagaatccttattttgcaccgtatatagctgaagatttaacgaatcagccggatacattgatccttacatgtgaatttgatccacttcgagatgaaggggaagcgtatggggaacgcttgaaagaggctggaaatcatgtggagatacatcggattaaagatgccttacatggatacttcgcgttggggatcaagcagcttcatgtacaggaaagtttcacctatattaatgaatttttgaaaggggaaacacagtgagtaagaaaaacgcacgctggaggaaattagacaacgcagcgaaattatattctgctgccagtaacaaaaaagatacaagagtatttcgattttactgtgaattaaaagaagaagtaaatcctaaagctttacaggaagcactgaatcagacgatagaaacatttcctacgtttttaatggtacttcgtaagggattattttggcattatcttgaaccgtgtaatctacagccgattgttaaagaagaatataaagagccatgcagcagactctatataagagataagaagaccctactatttgaagtaacttattataaaaaacgaatcaattttgaagtgtttcatgtgttgacagacggtacaggggcaacagaattcttaaaagaactggtaaagaattatttataccttgtgcataaagaagaaggattagaacagattacattactgccggaagatatgactgtacaagatcaggaagatgacagtttcttaaaatattattcaaaaaatcaaaaacgaccgaaaaaaagaaaactaaatgcttttcagatacgaaggaaaaagaaagatggaaatcatctgcatgtccatgaatctgttgtctcagtacaggcagtattaaagcgaagcagagaactcggagtatccatgacgatctttttgacagcattatttatgatggcaataaacgaagaaatgtctaagatgcagaagaaaaagccggttgtgttaatggttccggttaacctaagaaagttttttccgtcttcatcgatgttgaatttttttaactggatcgaaccgggatataattttacaacacaagatcaaagctttgaagcagttctgaaatatacgaaagaattttttgagacagaattaacgaaagaaaaaatgtcagcacatatcagcgagttactagcactggaattgcatccgattttgagacttgcgccattggaacttaaaaacctttgtattcaggcaggcgcaaaatattcggagaagaatacaacagcaatcttttctaatatgagcgcagttaaaatgcctgcaagttatgtaccttatattgaacgatttggcgtatatacaaataccccgaagcttgaattatgtttgtgttccttccaggataaattatcatttgcatttacatccagatacgacacagtgaacattgaacgcaacttttatcgcttgttaaaagaacagggaatcacatctgaaaaagtaaagcctgaatttccaaagacaggtaagccaagcgaacaggaaatgaaagtctataagatctatagttttctgtgtattgcgattgttgcggcaatgcttgttacggatttgaatttccacccaagaattcgatggactttatttacagcaggaggcgttgtgacgatgtggattgcctcgtcaatcggatttttcaaacgtcataatctgctgaaaaatgcgatgtggcagcttattatcggtacaatcatctgttttatatgggatgcactgaccggatggcacagctggtctgtagatcttgtgttgccgatcatgagtgtatctacacttgcagcaatgtttgtaactgctaaagtgcagaaaagtccggtgcgagagtatcttatttatgaaattatggccgctggatatggattaatccttccggtaatcttgcttttatgcggggtggtgaaaaatccaacagtgagtatgtttggagcattgacgtgtttcttattccttgtagcagtgattttgttcaagggaagagaatttaaagaagagatgcagaaaaatctgcatgtataaaatagagtgtaaaagttaaaagagaaataaattgctaaagtaaaaagcacaagatggacatcaattatcccttgtgctttttacatctagaacctataaatcggattcaccattatactgaaaatgtagaatatatctttacaagttcaatcatcatatcaactactttatccatactctgaacagaaatgtgttcataagggccatgatatccatgacctcctgtaccaatatccgggcatggaagaccacgaaaactcagctggcatccgtcagtaccgcctcgaatcggtgagacaattggagtgagtccggttctttcacaggcaagctttgcattatcgatcaggtgcatatgttcttcaataatatttttcatattaaagtactgatcttttatatgcagttcaactgtattttctccccattttttattcaactcgttagtgatatcagcgagtttgttttttctgcgttgaaaattgtctgtgtcatggtctcggacgatataatttagagtagcatgtccacaatctccgctcatattaatgagatgatagaaaccttcatatccttccgtgtcacgaggtgtctcgtgtaaaggcaacagactattgatttccatagccagaagacaagcattgaccattgtatccttggaagagcccggatgcacacttaccccatgaatatcaaaagaagcactgcatgcattaaagttctcatactccagttcgccctctgtagaaccgtccaatgtataggcaaaatctgcgccaaacaactccacatcaaaatgagaagcaccggtaccgatttcttcatcaggagtaaaggcaatacaaatcggaccatgaggaatggattccatctgcagatgttcaaccatagtcaggatttctgcaattccggctttgtcatcagctcctaagatcgtatttccatctgtggtaataagtgtatgtccttttaatgattccaaatgcgggaacatttccgggcttaaaattaacccactattgccaagagcaagttctttaccatcataatgttctgtgataatcggacgaatcggctgcttacagtaatcggctacagtgtccatatgtgcgataaagccaatagcaggtgcattctcatatccttttgttgcgggaagtttcccgtagaggaaacaattatcagtcagctgaatatttgaaaccacaagttcttccatttctttctttaaaagattagccagatcaaactggcatgcagaagaaggtgttgaatcgctggattcatcagaaggtgtttttataactgcatattttagtaaacgttcataggctttcatataaaatctccttaaaatgtaatttgttgtgtatatcgtatcatatttggcaggaagtgtatatttgaaatctgaaaaagtatgtttttattcgtataggaagaatggtattcttaacagtgatgtggtatactggacaatagattgacgttgttttttcacaagtagatggagaaaacaaatatgataatgggagagtaaaaatgattatcagaaaagcagaagaaaaagatattccaagaattttagagctattaaaacaggtattacaaattcatgcagacataagacctgatatttttattccgggtacgacaaaatatactatagatgaattggcagagcttctgaaaaataaagaaaagccgatatatgttgcagtagatgagaatgatgtttgcagggggtatgcattttgtcaattacaggagcagcccttttcaaataatatggtgcagtttaagtctctttttattgatgatctatgtgtcgatcaagaggctcgaggccagcatattggcgaaagtctgtttgaatatgtaaaaagtgaagcgaaacagctgggatgttatgaagtaacattaaatgtatgggcaggaaatatttccgcagagaaattttatgaaaaaatgggaatgcgaacaaaagaaagacaaatggagtatatattataagatcgttttcacttcggggattacaatcaataaagccggtggaggattttgaatcccgcatcggctttgttgaatttatagataactcgaaagcttatgcaactgtaaaggtgctgaaccgttaaaactttatttgctatggttcatcagtgctttaatgtcttcttccggtgtggtaataggtgcaatgccataattctccactagaaaattcagaatattaggagacaaaaacgccggaagagaaggaccaagacgaatgtttttgatacctaaatgcagaagcgttaacaagatgcagacagccttctgttcgtaccaggagagaacaaaggagagtggaagttcatttacggaacatccaaatgcatctgcaagtgccacagcaacctgaatcgcaccataagcatcattgcactgccccatatccatcagccgtggcagaccaccgatttctcccagcccaagatcattaaaacgaaattttccacatgccagggtgaggacaatactgtcagaaggtgtctgttttacgaattctgtgtaatagtttcggcccggtttggcaccatcacagccggcaaccaggaagaaatgacggattgctcctgattttacagcttctactatagtacctgcatgagacaggatagccgcatgaccaaaaccggttgtcacttttgtaccgccattgatgcctgtgaatatctgatcttccttgtaaccacccagttccagtgccttttcaataaccggcgtaaaatctttcttttcatcgatatgaacagcacctgggaaagcaaccatttctgttgtaaatactctgtcagcatagctgctttttggcggcatcaggcagttggtagtgtagagaatcggagcaggaagatgatcaaactctttctgctgattctgccatgcggttccaaaattcccttttaagtgagagaaattttttaagaacgggtatgcatgggcagggagcatttcaccatgagtatagatgttgattccttttccctctgtttgttcaagtaaaagctgcaggtctctcagatcatgtccggtcacgacaataaaaggccccttttctattgtaagtgtcacatcggttggttctggtattccataggtttctgtatttgccttgtcaagaagtgccatacacttcagattgatttctcctactttgagcactgtgggaagcagagtttccacactctctccataaccaatcataaacaatgcttcgcagaagaatcgattcacctcggcatcttcataattcagaacatttgcatgataggcataggctgccatcccacgaatcccgaaaagaataagagacttcagagaacggatatcttcgttggcatcccacagttgttgcatatcgtattcatctgttttaccgcatggtgactgacatttgctgcagtcaggaaccagtctttctttttcagctctgactttttgtatcatgttttcaattgatgcgttgtcaaaattcacatttgtaactgtagtaaacaatccttcaattatgatttgcccggttcttttagaaatagcagttgaaccgtcaacagctcttgcaaggctgatcaacgcacctgtcagttcatcctgtaatctggctgtatctgcttttttcccacaggcgccggcatttcctgtgcagccggtacatccgactgtctgttcacactgaaaacaaaacattttcttatccattattgcattctccttctttttttattctatagttttcccatcaatacctatcgttataacctgccatggtaagaattttccactattttgaagcgctttttttgctgccatctccagaccaccacagcaaggaacttccatccttacgatcgttacgctttggatgttgttattttgaatgattgcagttaatttctcactataatctacctgatctaatttagggcaaccgattaatgttaccttattctgaataaaatccttatgaaaacttgcataagcgtaagcagtgcaatcggctgcgattaaaagctttgcaccgtcaaaatatggtgcactgactggtgcaagtttaatctggactggccagttctgaagttttgatacagaatctacggttgaagatgattttacagactcaggtgtttctgtccgccgaatctgcataattttagatcccggacagccggagtgagaggacattgcctgattttgagtaactatttttttctgtgcttcttttacggcttcttcgtcatatgcaggagcttccctttcttcaaaagaaatggcacctgtaggacattccgggagacaatcaccaagtccgtcacagaaatgttctctcaccaattctgcttttccgttaatgatgtcaatggcaccttcatgacaggcattcgcacaggcaccgcatccattacatttttctttatcgattcgaataatctttcttatcatttttaccctccatttataacatttcacttttgtttctgctagaatcatagtataataaatacaacttgtatgtttgatttccaacaggaggaacgattttgaaaaaatatttgcctattctaagaaacagtccattcttcaaaggccttacagataacgagatattatccgtattgcattgtgtaaatgcaacaataatttccaaagaacgaaattcttatattttcagagcgggagattctaccgaggtaatgggacttgtgctgtcaggctgtgttcttgtgattcaggaagatctctggggacatcgaaatattctgtcaaaatgccataccggtgatttctttggtgagccatatgcagcaagcccgggagctgttttaaatatcagtgtgatagcagatgaggattgtgaaattatttccctgaatgtccagagactccttgtttcctgcccgacggcatgcgagcatcatcagaaactgatccgtaaccttgtcagtgtcctggcgaataagatactgatcctgaacgataagatcacccatgtcgggaaacgaacaaccagagataaactattgtcgtatctgtcagcagaatctatcagacattcgtcgttatcttttgatattccttttgaccggcagcagctggcagattatctttgtatagatcgtgcggcaatgtctacagagatatcaaagttacaaaaagaaggttatctaaaaacaaatagaaaacattttgaattgaccgtttctaatgacacagattcaggaataaaaatgtgacatatgtcacggaaaatagagaatcaattcaaaagctattctatagtgcaagaggaggaagcattaaaatgataaataaattacatttggcaatgattgaattatacagaggagatgcaaagaggattcaacatttttgtaaagtacatagttatgcaaaattgatcgcagaaacagaaaatgtagataaggaatgcttgtttatcattgaagcagcagctttgacacatgatattggaattcatttctgcgaagaaaaatatggaaactgcaatggaaaattacaagaaaaagaaggtcctgcaattgcagaaaagatgctcaaagaattaggctttgatcaagatgtatctgagcgggtccagtatttgattgcacatcaccatacatataataatattgatgaaattgattatcagatattggtagaggctgatttcctggttaatattatggaggatggtttatcgaaagaagctgcattaaaagcttatgaaagtattttcaaaacaacatgcgggaaaatgatttgcagggagatgtttgatttttgcagttgataatcagatgaatactgagaccagctgtgaagataaagcagcatttaaatacggcaaaagtggaggttattaacggaagtcatgataataaatgaagaatgtaaaaaatgtcagataaaacgaaatatcaataaatatcctgttaatgcaacagaagaaaagataacagaatatcaatataaggtgaaggagattgtaaagaatagtgatgggttatctacaccacaggttgcagaaaaaatggataatcttcgtcaggaactttttggaaatgtgatggattatacagaaatcaaacagcattacaatcaattaatgcttgatcaatttccgtatataaaaaataaagttgatacatctgaaaatcatttaaaaacagcaatacagtatgcaatggttggaaactatattgattttggagctttagaaaatgtaaatgaaggtgagctgaaagctcaattagatgaagcaataaatataaatatagattctaagctgttggatgtttttaaaaacgacttggtcaatgcgaaaaggctggtttattttacggataactgcggagaaattgtaacagataagttattgatttcaactcttcgcgatattaatcctaatttacatataactgtgattgtaagaggcaaaccagttttaaatgatgctacactagaagatgcaaaatacattcacatggaagatgttgcgcaaaaggtacttggaaacggtaccggattaccaggtaatgtggttggcgcaatctctaaggaatcaatggatgaggttgagaatgctgatctgttgatttctaagggacagggaaattatgaaggactaagtggatgcggattaaatatttactatttattcctgtgtaaatgtgaaatgtttatgagacgtttcggtgtcgaacaatttacaggaattatggcaagagaaaataataaaaagtaatacttactccttaaagttttatccaagacgaaagatatgttagaaaaaaagaggtgttacagaggcggttaataattgcgattaaataccgttcatctgccacggcactctttgaaagcttcgcccaaaagccagtaaaatcacagcctgaagggcataggtggttagaaaataaccccaaaataacccacggtattttgtacagatattacatgtaaatatagatgatgtctgggatgcaatatgatagaatggttacaagaaaaatttgtaggaatataaagatatggaattaagattattacgttattttttgacagtagcaaaagaacagagctttacaaaagcagcagaacaattgcatattacccagccaacgctatccagacaaatggcggcatttgaagaggaccttggaataacattatttattcgaaacgggaagaaaatatcgctcaccgatgaaggaattttattaaaaaggcgtgccttggagattcttaatcttgaggaaaggacgcttgaggaactgaaaggaaaagaaaaggttgtagagggcacgataaccattggatgcggtgaatttgcagcagtggagacattggcgaagatatgtaaaacatataaagaaaaatatccgctggttcagattgtattgcatactgcaacagcagatacagtgtatgagatgatgaacaaaggacttgtagatattgcattattcatggagccggtggacaccgaagggctggattatatccggatcacagattgcgatcactggtgtgtcggaatgcggccggatgatccgctgacagaaaaagagtttataaaaaaagaagatcttattggaaagcccttgatcctgccggaaagaatgaacgttcaaagtgaacttgccaactggtttgggaaagacttttcaaaattacagattgcttttacgagtaatctcggaacgaatgccggaattatggcggcaaatggactggggtatccaatttcaattgagggtgctgcaacaaagtattggcgagaagatattcttgtacagcgaagaatttctcctgaaatcacgaccagtacggtgattgcctggcgacggaatatcccatattctttggcagtccgtaaaatgatcgaggagattaatgcttttcaggcataaaacaaaattcaatataagcattagacataatgaagcgatagagcttaaaatagatgtgtaagatgaatgtaaatcttatacatctattttttgtgaaaaatacgtatagaaaggggctttttattatgagtaaaaaattagtggcatttttcagtgcaagcggaacaacaaaaaaagtagcacagatgatcgcagaggaagcaaaagcggatttgtttgagattgagccgaagattccatatacaaaggcagatcttgactggatgaataaaaaatcccgaagcagtgtggaaatgagtgataagaaatacagaccggagattatggaaaaagagatcgatatgagttcttatgacgaaatctttctgggattcccaatctggtggtatgtggctccgacaatcatcaatacatttttggaaacttatgatttcagcggcaaaaagatcgtgctttttgcaacatccggtggaagtggatttgggaacactgtgaaagaattgcagtcatctgcatcagacgcagttattacagaaggcagactgctaaatcgtggaacaaaacaggaaatcagtgagtgggtaaaatctttataaataacagtgctatggaggtatacagaacatgaaaaaaatagtacagacagcaggaaaaaatgcacttggtgaatttgcaccggagtttgcacattttaacgatgatgtacttttcggtgaaaactggaataaccaggatatcgatgtaaaaacaagaagtattattaccgtggttgctctgacggcttccggaattacggattcttctttaaaatatcatcttcaaaatgcaaaaaatcatggtgtaacacaaaaagagattgctgcagtgatcacacatgttgcattctatgcaggttggccaaaagcatgggctgttttcaatcttgcaaaggaagtgtgggaaacaggcgaaggagatttgccatacgaagaggaagcgatgcgggcgcatgcaaaagagatggtatttccaattggtgcaccaaacgatggctttgcacagtatttttcgggcagaagttttcttgcaccgatttctacttctcaggttggaattttcaatgtgacattcgaaccaggatgcagaaataactggcatatccatcatgcaaaaagtggaggtggacagattctggtatgtgttgccggaagaggatattatcaggtagaaggtaaagaagctgtagaaatgaagccaggcgactgcatcaatattccggcagaagtaaaacactggcatggcgcagcaccggatgaatggttttcacatctggcaatagaagtgccaggtgaaaatggttccaatgaatggcttgaaccggtaagtgatgaagaatatagaaaactaaaataggaaggttgaaaaaagtatatcagctgggagtcaatcccccagctgatatagcctccggcaggattgcagaggtgcgctgtagaagtatgtcatgcaattgcatgacgcgcacctcgcagcaagaatgccgaggcattcttgaattataagacaatttgcatatggaggttatatttatgttgaaagcagaagaattaaaactagtatctgaatgggataaaacttttccaaaaagtgaaaaagtagatcatgagaaagtgacatttgtaaatcgttatggaatcacacttgctgcagatttgtataagccgaaaaatgcatttgggaaatatccagcgattgctgtaagtggaccatttggtgcagtcaaagaacagtgttccggactgtatgcgcagacgatggctgaaaaaggataccttactattgcatttgatccttcttttacgggggaaagtggaggcaatccaagatacatggcttctccggatattaatacagaagatttcatggctgctgttgatttcctttctgttcgggaagaggtagatcaagatagaataggaatcattggaatctgtggctggggtgggatggctcttaacgcagctgcactcgatacaagaataaaagcaacggttgcatctaccatgtatgatatgacaagggtaaatgcgaatgggtactttgattctgaggacagtgaagaagcacgttatgcgaagaagcagtcgctgaataccctcagaacacaagaatactgtaaaggcgaatattccagagctggtggttgtgtttctcttccggttccagaggatgcccctttctttgtaaaagattacagtgagtattataaaggcagatgttatcataaaagaagcttgaattccaatgatggctggaacagtattggatgtatgtcatttatgaatcagccaatattaaagtacagtaatgaaatcagaagtgcagtcctcattgttcacggagaaaaagcacacagctattattttggaaaagatgcttatgaaaatatgattaaggacagcaagtacacatccaataaagagctgctaacaattccaggggctgttcatacagatctttacgataacctggatgtaatcccatttgataaaatccagaaattttttgaagaaaacggagttggttaattatggtaaaaaaagtattgattatatcgacaagtcttcgaggagggagcaattctgatatacttgcaaatgagtgtgcaaagggagcaaaagatgtaggacggattttgcggacattcaaaataaaaaagaatgtggaggtaacagacaatggcaaaatcattatttgaggaactgggcggcaaatacgaaaggcaaggggattatttgataccgtgcttaactgtacccgccgaagaagaacaggcaataggcatctgggggcaacggcatttagattatctaaaacagtaccgtaaagttacatacaccaatcttcttacaagcggcaggctaaacgcctaccttgccgacatcaacagacaggcacaggaacgctttgaaaggctcatagagggtatgaaacaggcacagggcataacggaacagctaaaggcagaaaacgccttagaatggacaggatgcctcaataacataagggcttgtgcgagggagattgtggaaaaggaaattatttttgcataaacagatgattagtggcagggggaaatcctgccgctttttctgctttagtttgtcagcttgacaaataaagggttaaggaatataattagattcagtattatacaaggagttaataaatatgcggcaaggtattcttaaataaactgtcaatttgatagtgggaacaaaaagtagcagtcccgtttcacttttattttaatatggggcttagttttttgtacccagtttaagaatacttttatcatgtaattttatatgcccgaaaacatataagtgttttggggctattggagttatttacccagtgataggagtatttatcactgggtatttttatgcccttttttgggtgttgataggaggaaaatcacatgaaaataattaacttaggcattctggctcacgttgacgcaggaaagacaacattaacggaaagtttattgtataccagtggtgcaattgcagaactagggagcgtagatgaaggcacaacaaggacagatacaatgaatttggagcgtcaaaggggaatcactatccagacagcagtgacatcttttcagtgggaggatgtaaaagtcaacattatagatacgccaggccatatggattttttggcggaagtataccgttctttatccgtattagacggagcagtattattagtttctgcaaaggatggcatacaggcacagacccgtatactgtttcatgcactacagataatgaagattccgacaatttttttcatcaataaaattgaccaagaggggattgatttgccaatggtatatcgggaaatgaaagcaaagctttcttcggaaattatagtgaagcaaaaggttgggcagcatccccatataaatgtaacggacaatgacgatatggaacagtgggatgcggtaattatgggaaacgatgaactattagagaaatatatgtcagggaaaccgtttaaaatgtcagaactggaacaggaagaaaacaggagattccaaaacggaacgttatttcccgtttatcacggaagcgctaaaaacaatctggggattcggcagcttatagaagtaattgccagtaaattttattcatcaacgcctgaaggtcaatctgaactatgcgggcaggtttttaagattgaatattcagagaaaaggcggcgttttgtttatgtgcgtatatatagcggaacattgcatttgagggatgttattagaatatctgaaaaagagaaaataaaaatcacagagatgtgtgttccgacaaacggtgaaatcgtcccggctgaccatgcctgtccgggagaaattgttattttagctgatgatactttgaaactgaacgacattctgggaaatgaaaaactcctgcctcacaaaacatggattgataatcccatgccattacttcggacaacggtagagccgcaaaagccggagcaaagggaagccctgttaaatgccctcgcagagattgctgatacagaccctcttttgcattttgacattgatactgttacacatgagattatgttatcttttttggggaatgtgcagatggaagtcatttgtgccatccttgaggaaaaatatcatgtggaggcagaaataaaagagcctactgttatatatatggaaagaccgcttagaaaagcagaatataccatccacatagaagtcccgccaaatcctttctgggcttctgtcgggttgtccatagagccgctccctattggaagcggagtgcagtatgaaagcagagtttcacttggatatttaaatcaatcgttccaaaatgcggttatggagggggttctttatggctgcgagcaggggctgtatggatggaaagtgacagactgtaaaatctgttttgaatatggattgtattatagtcctgtaagtacccccgcagactttcggctgctttcccctatcgtattggagcaggctttaaaaaaagcagggacagaactattagagccatatctccactttgaaatttatgcaccgcaggaatatctctcacgggcgtatcatgatgctccaaggtattgtgcagatattgtaagtactcagataaagaatgacgaggtcattctgaaaggagaaatccctgctagatgtattcaagaatacaggaacgatttaacttatttcacaaatgggcagggagtctgcttgacagagttaaaaggataccagccagctattggtaaatttatttgccaaccccgccgcccgaatagccgtatagataaggttcggcatatgttccacaagttagcttaacagcttgcaaaagtcatataaaatgagatttgaaaggattagagactaattatgatgaaatgcgaatggatattgtgtcctgtttgtgggagcaaaacccgtaataaaattaggaaggacactgttttggagaattatcccctttattgtccaaaatgcagacaagaaagattgattaaagttgacaacttgaagataactgtcatcaaagagccagacgcttaagacgcagagccgatgaaattgtggaacaattcacgaatcatcggctctttttgtttcgtatttgaaagaacaaactcaccaaataaaaaaaacgatattcgggtgggttattttgttataccctaaattaccctctgaatttgtttttaaatttggagggatttttttatgtccttttttcgggcagttatctatctgctcatacgaagcaaaatttatcaatacatagcatatcagagaacggcaggaaaccagttaaaaaaatttctgccagtgcaacggtacttctcaccttgaaagtagaagtacaatctccatacaatagaattactatttcctataaccgtaaaggtcacagagcctttgcggtttttcttttgtcgatttttgttggaaagtgccgtagggctgtttctgatatgcggtgtcgttctccgcctctccatctggattttttacatttcaaaaattcagatgggaggtatttatggtgaaatatgcaccaagaaaggtatatatcagagaaagtggcggctatgtggaattatcctacacggagttctgccgttgcagggaatccgaccagacctatatggacaagctgtttatccccattcaaggctgtctgcttgaagtcgtgagggagcaatacacagacttctaccgtgacaaggaacggtggcgttatctgcaaaaattagatacaaagaatagactgctatctctcgacggatttacggacagcgaggggaatcctctggactttatcactgatgaagcggtggacattgcagaaaccgttgtcaatgcggtcatggtggacaggctgaaagccgccctgcctttgctgtcggatagtgaacaggagctgatacaggcaatcttttttgacggactttccgagcgtgaagtcggggcgaggttgggcataacccagagcgttgtaaacaaacgcaaagccagaatcctaataaaactaagaaagataatagaaaattaaaatttaaggcgttcagcccccttgttttttcctttgggaagatgagggggcttttctctgccctctcaatcaattctgattggaggaagtaagaatggcatacaaccacggacgggaggacaggaaatggcgtatctggaaagaagcggaggaaaagctgctgcgtgagtgcggcgttgatgaagcgaccattgagcagatacgcatggcggacagggcagacttcaattccaacaggcggttttaccgatggacgaatgacgttgcggaatatcttgaggacatggcaggcagggagcggcaggcggaagtgggtacggttgcggagttactggaagagattgagagcgaaaatctctatcaagtattagtcacggtggacgggcgtaccttgaaaatcgtcctgctgaaaatgcaggggtattccacaaaggagattgccccgcttgtgcatttgacgactggtgccatctatgcgaggttagaccatctgcggaagaagctgcggaaaattttatagcttctaaaacagcctgccatcctgcgggctactgggtgagggatggaaatcccctcactcattttttgcaggaggacaacaggatggcatacagggttaaggcatacacgcttcgggaggaatccacggaaagcggcacaaggtattttatcagctttaaggacgggcagggcaaatcccacgagttggaagtgtcggaacagttctttatggagtttcggcagatggagcgcaggaacaggaatcttttctaatgggacgagcggcacagggagtttaacgaggtatgggacgaaaccctttacagacgggcgttgcgtgtgcctaagagccttgatgaacgcatggttgaggaagaacggaatgaaacgctctataaggcggttgggagccttccagagatacaaaggcggcgtttcctgctctactacgagtatgagttcaatttttaccaaatcgccgctatggagcattgcaccgcttcggcaatacagaaatctgttgcgattgcaaaggagaaagtaaaggcggaaattgaagaaatatctccaaccgtgaccgacaccgcccgaaaaagaaatctgttttttatttgtgtgggattggcggcattacatactctcacttttttccgtgggagtaaatctatttttaaggaggtcaacgcctatgtgcaacgaaaacaaagacaccgcccgaaaggaggaaagccatgcagaagttacagacagtcaacgccgaaacgctcctttatgaaccgcttgagaaaccatcctttgtggtggacagccttatcccgacaggcttatcgctgttctgcggctcacagaagataggcaaaagctggctcatgctgaagctatgcttatgcgtgtcgcagggaatccctttatgggatatgccgacaatggagggcgatgtgctttacctctgccttgaggacacgttctgccgcatacaggacaggttatttcgtttgacggacgaagcaagcgggcggctccactttgccgtggcaagctgcaagctgtcagacggtcttatcgtgcagcttgaagattatctgaaagattacccagacagcaggctcattgtcattgataccttgcagaaagtccgtacagcttcaaaagacaatgcctatgcaagcgactatggggacatctccctcatcaaagactttgccgacaggcactctctggcggtcattgtcgtacaccacatccgaaagcagaatgacagcgacgtgttcaacaaggtgtctgggacgacaggattaacggggagtgcggacgctacctttgttctggaaaaggagaaacgtgcgtctgacaccgccaagctgtatgtgacgggcagggacacgccttatcaggaatacacgctgcgtttccgtgattgccgttgggagcttgtggagcggaaaacgcaggagcagcttgcgaaagaaacgataccagatgtcctttttcggttggtggattttatgagggataaggaagaatggataggcacggcaacggaactgttagccgctatgggggaaacggaaaccatacccacggtgattacgaaatggctgaatgaataccgcaccacatttttaagcgagaaccgtatctgctaccagtacagccgcaggaaagacggcaggcggattgcccttgcaaggagggcgggtgacagcggtgatggtggtgacagcgatattaggatacccccctgttactgtcattgacgcttaaagccatgtaaagctggcggctctgccctgcgggtgacagcagtgacggtggtgacagtgattttaggataccctgccgctgtcatccctacgggagaacaccccgtaaacgcaaaatgcaggcgtgagatttactcgcccttttcggtcgtgtaaaaccacccctgcggtcagaaaaatcattccgatttttccgactgcgtttacagggtgtaacacactacactttgccctgcaaagtcgtgtgccagacgttccctctggactcccttaaggcagggctgtgccctgctatcctacgccttacggcttcggataaaagaatggcggcatgacggtgacggctcttgcgaggggggtatcccaaaaacaccgtcatcatcgacatgaccgtcatgcagggggtgagggtgacagttgcggcagtcggcagggggtatcccaaaactgctgtcaccaccgtcaccgctgtcaccccaaaggacggtcacccgccgaaagaaaggaggaatccgcctatgccttatgcaatcctgcgtttccagaaacgaaaagcgggcggcgttgcggcttgtgaacgccacaacgagcggaagaaagaagcctacaaaagcaacccagatatagatatggaacgctctaaaaacaattaccatctcatagcaccaccaaagtacacctacaagaaagagattaaccgcatggtagccgaagcggggtgcaggacaaggaaagacagcgtgatgatggtggaaacgctcatcacagcttcaccagaatttatgaaccagttaccgcccgaagaacaaaaagcgtatttccagacggctcttgacttcatttcggagcgtgttggaaagcagaatatcctctccgctgtcgtccatatggacgagagaacgccccatatgcacctctgctttgtgccgattacgccagacaataagctgtcagcgaaagctatcttaggcaaccagaaatcattatccgagtggcagaccgcctaccatgagcggatgtcctcacggtggaatcagcttgaacgggggcagtcctcaatggaaaccaagcggaaacacgtccccacatggctctataaattaggcggcaggcttgataaacagtatgaagaaatcgtgtctgccctatccgacatcaacgcctttaacgcagggaagaaaagggataaagcgttagatttactctctgcatggctgccagacgtggagaaattctctaaggaaatcgggaaacagcaggcgtatatcgacagtttgaaagagagaattgggcaggaatcagactatgcggggcgtatgcgtgatgaaaagtacgagcaggaactaaaggtgcagaaagcgaatcagaagatatttgaattgcagagaaccaacgagcagatggggcggctgctgtcaaaaataccgcccgaagtgttggaagaattgcagaaaaatcatagaagcagagcgaaagaaaggtagatatgtgaatgaagaaacaggattttaaggtgttaaagaccaaagacttgtacccgttccccgacaatccgtttcatgtggcagaagatgaaacactgtcagagttagcggaaagcatcaaggaatttggcattgtcacgccgataatcacacgcccgaaagaggacggggacggttatgaagtgattgcaggacagcggcgtgtccgtgcttctgaacttgcagggataaataccgtgcctgcgtttgtcctgcccttagaccgtgaccgagccatcatcacccttgtagacagcaatttgcagcgtgagaatatcctgccatcggagcgggcgtttgcttacaagatgaaatccgaagccatgaagcggcagggtttccgcacagacttaacctcgtcacaagttgtgacgaagttgcggacggacgacaaggtggcacagggcttcggcgtgggcaggatgaccgtgcagcgttttatccgcctgacggaactgataccgccgattttgcagatggtggacgaggggaaaatcgccctcacgcctgcggtggaactgtccttcttgaagaaagacgagcaggaaaacctctttgccacgatggagagcgaagaagcaacgccctcactctcacaggcacagcggatgaaacagttaagccagagcgggcggcttgacatggatacgatatttgcgattatgacggaggaaaagggcaaccagaaagaaaccttgaaaatcaacacaagcaagctgaaaaaatactttccgaagaacacaacgccgaagcagatggaggaaaccatcatcaaacttttggagcgtgagttgcagaggaaacgcaaccgtgacagccgctaatcttcttttttcgggaagtaaatacagagagttgaggtatggagaatgagagaaatccagtatgaaatcgtaaaggaaatcgcagtattgtctacgggcgacagtggctacacaaaggaaatcaatctcatttcatggaatgggaaagagccgaagtatgacatccgcagcttttccccgaaccgtgaaaagtgcggcaagggaatcacgctgaacgctgatgaagcggcggcactccttaaagcattacagaaagaattaaacagcgaggattaatggtatctgattggcagggcggggacatttccaaactcttccctgccctgtctggaaaggaagatttaagtatgggcgaggataagaaagcagataaaaagagaaagcgtatcgtgccaaaagcaccagtgcagatgataatcagccgtgaatatgtcggcacacagaccgttacagaagcgtttgtcccgattatctccgaggatattcggaagaagattgccgagggcgacaccttcgacaatgaggggctgtccgcttagaatgtacgcaatgggacatgaaaacagataggacagatacggaggttttacagtatggcaggaatcaaagaagaaaagaaaatctatttagtcggcatttattgccgcttatctaaagacgatggtacggataacgagagtgcgagcattgcgacacagaaatccatcctcacggattatgtgaaaaagcagggatggcacatagcaaaaacgtatgtggacgatggttattctggtacaaatttccaaagaccaagtttccagaatatgataaaagacattgaaagcggtctgataaactgcgtgattacgaaagatttatcccgtctggggagaaactatcttgattgtgggttatatctggaagttttcttcccagagcataacgtgaggtatatagcggtcaatgacggcgtagataccttgaataaatctgctatggacatcacgcctttccgcaacattttaaacgaaatgtatgccgctgacatatctgttaagataaaatcggcatatcgggcgaggtttcaacaggggaaattcatgggaactaccgccccttatggctatatcaaagaccctgccgaccacaaccatctgctgatagatgataaagtggcacatgttgtaaaagagatattcgaccttgcattaaaagggaatggagttgccaaaatttgcagacatcttaataaacagcatatcctacgccctgccgcttatgcggcggagcgtggcgaaacaggctttgaacgtcattttgaggggaacgaggacaaacgctatatttggagtgggaacagcgtgaggagcattttaagaagcccgatatatgcgggaaatcttgtaggctacaaacggattgccgccaatatgaaaagcaagaaacgcccctctaagctgcccgaagaatgggaagtgatacccaatacccatgagggaatagtcacgcaggaggaatttgatattgtccaacagcttattacaagtcgtaggcttccacagaacaagggaggatttgtaaatatttttgcaggcgttatcaagtgtgtggactgcggatgtgctctgcgggcaatgaacgtacacaggaggaaacgcccagagattatcgactgtgtacagtattcatgtaataattatgcaagaaacggaagaagcgagtgtagtgcccacaatatagaagcaagggatttattcaatgccgttcttgccgacatcaactgttttgcggatatggcagtgaatgatgaaaaggcggtcagggacatagaaaagcggctcacggaaacagaccagagcagggcgaaagcattagagaaagaacgtaagaagctgaacaaacgccttgcggaactggacaggctgttttcctctctctacgaggataaggtcatggagcgtattaccgagcggaattttgagatgatgtcggggaaataccagaaagagcagcttgaaattgaagcaaggctgaaagaggtgacggaaactcttaatgaaagctacgagaaatcacggggaatccgtgacttcctcgcccttatccgaaattatcaaggcttaaaagaactggatgcaacagttataaacgcactcatagacaagatacttgtttcggagcgtgagaagatggcagacggaacagtgaagcaggaaatcaagatttactataaattcatcggctttgtcgatgaattacatatcatacctacaaaacggtgggcagcaatgcccgctaaaaattgtacggtgtgcggcgttgaatatgtcccgggctctggtgcatcaaggtattgtcctgcttgtgccaagaagatacggagggagaaatcaaacgagagcaaacgcaggagcagagaacagaaaaggatagcatgtatgaactgtccgcaaaaaatgaccgactgaagtggggcatggtgtggaacttctttctttgaaaaggcttccttaaaaggcatggtcggtggaagtggaattgatgcagcaaatacagctgaggatcatgtggatataatgaagaaggcatatgaacttggaaaaaatttataaattgataaaataattctaattattaaaactaatagtaatgttagagtccgcttgaaacagggcataagagcgaacataggatgaccccgaaaacccttgaaaacagccacttttggtagaaaggaatgtgattttatggcaagaccaagtttagcagaaaaggatattttgagattccaaaagaagagtcctcagaccgggagagcgcgtaagggcagatggaaaatatcagtataagtaccatattgatggaaaaccacattttgtctatacttggaaactggagaagcaggtcaatacggatttggatttgctggtaaatatcgtggacatgtcagtttttgagggtttggtttgagggtctggaataattccagtcagctgtgtgaccaccttgtcggaaggagagaaagtgtgaaagaaagtagaggaaagccatagattagcgcacttcaataagctgtctaaggcagacaaccattactccacatgtatgccgacacacgtattgttcaaatatggcaaaatcgggaatgaatcccaagacattacagtacctcatggggcattcagatatatcggtcacaatgaatgtgtacacgcatatcggattcgatgatgctgaggaagaattaaagcggatggaagagtttaggaaagcgcaggtggaggttgagcagaagaaagagaaaccgatgtcgcagaagatgtttaaggtagtttaatatggaagataggcaacgctctggcttaggctggggcgttttttacaatgttgccgaaattgaatttgtggcggattatcaaaagaagtagtataatataaatgctatcttttaaagaggaagtgctaaagatgaaattacaatctgtagaagaatttttttataagagagaaactgttgaaaaatataatgatgataaaatcataaaactgaattgggaatgtccggatgtattattctcctttagaggagtatatgctattggggtttttatttattatcgacaattatttgtagataatgtgaagacggatattatggtgaaagatgaaaagggggctacgagacagcgcctttattccgataagtttttaagtgagaattatccacaatttagtgacgtaaacgatttaccggaaataaaaggatttttagaacactactatgatatagggaacataattccaacatggccaggggcgaatgtaaatagaggaatggcacattgctatgatatacccaatgtgtattataaacggcatgctaaatttacgaaattagtttatggtagtatttatagaaatgtattcatagagaaaattttagaaaacgataaatatgatactgttgaaaagttattaaagttgcaaccagaacagtatgttaagtttctagaatatattgtggatgtaattattaatcgaaataaacagttgcaagatattttacaggagggaaatgggcatgaatagttttgaattaattcctacagaagaaaatttgatacatacattggacaaagatttattgaaacgaaacaaagatttagtgcgtttttatgatttgatattagcacaagaaggagattcttctattgctattgatggcagatgggggagtggaaagactttttttgtgaaacaatctatgttgctaataaatgcaaaaaatccgatgagcgatatggatgatgaaaagaaagcaagtattgtatacgcacttccatttccgaaaaaagcagaagacatgccagagaattatgatgtggcagtttattatgacgcatgggaaaatgataatgatacagacccggtattttctttggtgtacgaaataataaagcagttaggaataaattatgcttttgatgataatagcaatgcattcaagttggcgggttctgtgttagaggcacttactggtagaaatataaacggtattattgaaaaattaaaaagcgataatccgcttacaaagattaaagaagaaaaagatttacacgagaatattaaaaatttctttacggagttgttagttgaaagaggaaatcggttagtggttttcatagatgaattggatagatgtaagccaagctatgctgttcaattattagaaagaataaaacattatttatatgatgacagaattacgtttgttttttctgttaatttaggtgagctacaacatacaataaagcattattatggtaatacatttgatgcgtgcagatatttagacagattttttgatatgagaatatctttgccaccagcagataaaactgcattttatagggaaatggggttggaatctagttatgtcttagaaaaaatatgtcgaaaagtaatagatacatataatatggagttgcgtgaagccactcgtttttatcgacaagtgaaaacagcaatatatgagcctacacacgagagtagaaaatttgatttttctttttcagatggaaaaggaagacaacttttattgatgtatgtggttccaattcttgtaggactaaaaattgttaatatatcgttatataaccaatttgtatgcggaaaaagttcgaaaccacttatggatatttataaagattctgataagggagaatggttggctacacgattgctgaatagaaatgaagcctttgaagtggaagaaggtaagagtgtagttactgttgaacaaaaaatccaacagttatacgatgcaatttttgttacagaatatacgggaaaagtgtatcataccatacttggagagtacgagtttgatgataattctaagaactttgtgaagagtgttgagagtatgctttcagtatatgcagattataatatataatccttagtagtaagccaactccattttactaccaactttactactaacagcccgcaataacttgctccatcttgctctattttgccaggagttcagcaaaaatacacattttacaaatccctagaaacccttgcaaaacagggcattccgggacaaatcaaggagaaacaaaataatgataaaagtactatttgaaaagtactatttatctgccacggcaggactttggatacagttataaatggcgatgaagtacgatagaacggggcaaattgtggtggagcgatagattaggaactacggtttttatacggacgagaatagcaaattaatgagatgaaatgtgcagttgtcctatgaataaatgtggaagtagcaggtgcaaaaggacctgctaattttatgttgcaacgtggtgatttgtattgtaaatgttgcacacagatgatataattttgcacataggagggctttaaaatgaataaaacaatttctatgagtataagagttagtgaagaagaattggataagttgaaacaggctgcaagaattgaagcatatgcttcgtatagtgaatttgtaagaaggacggctttaaaagaatcagatagagttataaaaaggaatgaaagagaaaatacacttaaggaggactagtatacatggagataaaagatatattggaaccaagtgaatatgattcgttgaatcaatttacttcggatgacatagagtggattaatggtagaattaatactcgaagaaatggagaaccaggcatagaatgcgttgtaagaggaaaaaataacgatggcgattattttaagctaacaccagaagaaatagtgaggcagtattatgcgtataagttgattactgaatacggttatgataaagaacagctttctttagaagaaccagttcttattgcgggcaaaacaatagatactgataaaagaattgatattgctgtttttgactctgaacataagaaaattcaaatgataattgaggtaaaacgtccacgtattactaattatcataaaaattgggatggtgagggatcaacgccgtatcagcagatgtattcctattgtagtcagaagaaatcacagctaggggttttggtaaatggtgtatcaacaccggagttttatgattttccatattatgagaatcagttaataattgatcgttttccacaaaaaggtgaagatattcaagaatggaaagacaaaagaagatttacattaaaacaattaatgcaatcagatagactcaaaactgaaacattaaaggacattattctttctgttgaacaaaaatttggagcaaatgattcaagcgaaaaagcttttgaggaaatattcaagcttattttttcaaaattgtatgatgaaaaaatgtctagtagggatgctgatgttatagctattggtcagaatgaatataataagacattaaacgagattgatgattcaaaattcagggtattagagttccgagttaaagagcaggattcattagataatgtttataataaaataaatgaactatttcaaaaagcacaaaagaaatggaggggagtatttcctgatgattcacgtatagagatgcagaagggggcattgaaatcatgtgtgaaagaattgcaaaatgtaaaactttttaattcaaatttggaagtggttgatgatgcgtttgaacatttggtaaataataatcaaaagagtgatatgggccaatactttacccctcgatatgttattgatatgtgtgttaaaatgttgaatccaaaagaaaatgaaaagatgatcgatactgcagcaggaagctgtggattcccgatgcacactatttttcatgtttggaaacagatgaatcccgatgcagctaatttgtttactacaaatgaaagaactgctgaagagaaagagtatgttcaggaaaatgtttttggaattgattttggagaaaattgtgttcgtgttggaagaatgcttaacattattgctggtgatgggcatacaaatgttttataccttaattcactagattataaaagctgggattcagagtttgcgaataatccattatgggcagcgaaatatggtgaaggatttcataaacttgtagatttaagtaagaataaaagagctacagagcccaaagaaaaatatcaaggctttctatttgatgttttaatggctaatccaccatttgcaggtgatttggataatgttgaacaaattgatccctatgatttaggtcataaaggtggtgatcctaaagaaaaactacaaaatgcggttgggagagatattttattcatcgagagaaatttgaattttttaaaacctggtggaagaatggccattgttttgccacaaggaagattcaataatacatcggataaatatattagagagtatatattaaagcaatgtagattattagcagtagttggattgcatagaaatacatttaaaaatggaaaatcagggactggtacgaagaccagtgtactatttgttcaaaaatggactgatgaggattgtggataccctaatatatgtccaaaacctgatgcagatgaaaatggaaacattgattatcctattttctttgcaacaatgcaggaacctagtaaagataattcaggagataaaatatatgttacagagacatatgtaaactggacatcgtataaatatacgactgtaaaattgattataagaaaatcagataaatcgattatttcagaagaagaatataatcagattgcaaataaggagaactatgataaagttgaaaaaaatatcttatatataagaaagagtaatgaagaattagttacagaagaagagtatcttgcaaacaaaaaggagtataagaaaaaaacaatttatgaatataagcgaaaaagtgatagtgtaattatatccgaagatgaatataaggaaattacaaaaaagtcaaattattcgataaaaattgagactgtaactattccagaagaacataaaacggaagcaggcaaaactaaattcattaaggatttatttattgaaaaatttggagatttagaaagccataaaaaatggattttgaaaaattctatttttgtcctgagagataattgcgatttagaaaatcctaaagaacttagcatagttgaatggttgtcattagctccggacgtaagagcgctatataaagaagaggaagtgttaggtgataacaataatgatatcatttcaaatgaagaatatttaaatctttcgaatgaggaacagaagttctatctaaaagaagaagatgtagttgaatatgatgagagagtaaaagatacgcatgatcatatttttgttaaacacgatttgtttaatcatgatcctaaattgaaaaatgttaatcctaataatatctatagtcagaatggaattgctgaagcctttatcaaatttgcgtatgataataaacttagctttgcacccacagaagaggagttgaatcaaataatgcatccggagaatgaattccctttttaacaagcctctccagtgatgatgcattcaacaatttgttggagaggctggaatgttctgttgtccaattgtcgagggtagatactggaacaataagatttgattcagaatactactcaaaaagcaatattaaattagaaaaaattattgctaagaagaaaggaaaaacagttggtgaacataagggtattgtagattgcagtgcattttatccatctatcacgggtttttatagtgatgataggagtttagtgccttttttacgtgtgaatgagataagtaatggattggttgtgctcacagataagactgtttttttgcctcaaaaagttttggatgataatcctactactatttcggtggcatatccaggggatattattattgctaaaggtggaaatacattggcaaaggtcggactggttacagatgagtatccaatgtacgctacgtgtagggatgttattattctacgaacaaatattcttgaaggcattaacagatattacttgtggtcttttttacattcaagctatggtcagaatcttatgtggagatctgcttcacaaactggacagccacatattacattaccaataataacgaaaatgcgtattccagagtattctaagaagtttcagaaagaggtagaaaatttgtatgaagcatctgtgcaaaagaaaaaagagtcggatgcaaaatacaaggaagcagaaaaaatcctaatgaaagagttggggattgataaatgggagccatgtaaacataatgtgtctattcggtcattttgtgatatacaaaaggttaaaagatttgattcagagtattttatgccacaatttgatgaattggtagaacgattgaataaatatgggtgtagaccactaaattctcttgtgaacatagtaaaatctattgaaccaggtagtgatgcatatttatcagaaggtgttcctttttatcgcgttgctgatgtatcaaaagaaggattgaaagaacctgatattttcttggatgaaaaaaaatattacaatgaagagttgtcttttaaaaaggatatgattttattttcaaaagatggaagtattggaattgcatataagatagaagaagatatgaaggctatttcttcaggagctctattgcattttattttgaaagataaatcagtattggcggattatttgacacttgtgcttaattcgcgtgttgtaggtatgcaagcagagagagatgcaggtggttcaataatacaacactggcgtccagaggaaattgagaaagtattgattcctattgctgatgataagattcagagaaaaataacagaggttataaaagagagttttaggcttcgtgcagagagtaaagctttgctcgaaaaagctaagaagtctgtagaactagcaatagaaacaagtgagaaaaaggcagtagatcttctaaatctcacattggaatattgatgtaggggcaatatatatttctacatttttttgagggaaagaccgatgccccctctcacgcatattttcgcgaaattgcgcagggggtattgtgggaacttggtctttgtagcttaaatggctgagattaaggaaaaatattgaaatgctgtgcgcgaaaaatattgccgatttgtgtagaagtagggctgccttgaaatagggcagctctttttcaaatattgtgttgactaatttgcccggtagagtgatatatgtacataccaaaaagaaaggtggtatgtacaatgattacagaaattgattttaaagttaaaggtgaggaacgaaagaagctgtcttatgccataggtgaattacttggaatgccggtaaagtataccagaacaccaaagtttgattatctgattggaagcaacgttttggataagaatggagtgtttcatgcatccgaggatatgactgaaagtaagttggaattggttttagaacataaacggtaaataggttctttccattgttagttgaattcacagcgaaattgctcgtgtaaaagcacttttgcttttaataaatcaaaactatttcgtccgtacataattctcttaattactttaattttgttgacacttccttcggcaagtccattattatactttaattttatcccgttttttaccgcattaatatcaattcttataccgttaacataggtctgtagctcaggtatgttaaaattttctattttttcaagccatgtttctaatctttcgtcgcgccttgaatatagtatttcatagaattcttttattgcagcatataatttcagtaatcactgggtacgttttaagaacttgctcatattgcgttttggtaattgtcttgacatcacttaatcccttatagattaattgtatcaaagatcttctctgaatgtattctttcgattgataatccgagcaggtctcttgttgacttaaatgtgcttcatttcgaatacgttctttttgaatgaacatccttaaggatgcaactgaacctttataacctttttcggtaataattttatgaatattgggataagtcattccttcgcttcttaacttaattacttcagcttcatatggtgcaagctttcctggaatacgagcattataatgtccatcttcaacagaataatttggagataaatatctttgtatcgttttacaggtatgatgcatagtcttggctatttcttctataggcacaccttttttagctaatgctcttgtctcattaacttcattttgtttctgtttcatagctaatagatgtttcttttcctttacaattgtcctattttcaaattcatcaggatcgagcatcaaatatttttgaactgtttttacggaggagtgcaataataatgcgatttcattgactgtcatattttccgaacgtttttggtgagcaaaactaacacgttctttgcgattatttatgttatgtaattttaaaatttcatcagcttcagcgcttactgctggaatttctatacatgcaggaaatgttcttatcatatactttgttatagcctcagtcagtccctttattatatggaatctgtcacttacttgggttataccaggatgcgatctttctgctgcatttgcatacaactgtgcaccatctctagaaataacttcaatattaggatattttgacaaccactcttttacttcattagtatttcgagttggaatcaaatcgattatcttatgactttccaaatcaaccatcactgttccatacgaaaaccgtttgcgcaacgcgaagtcatcaacacaaactttttttacagaagacttatccacaattgatggcattttttttaagcaaagaacagatactgctttttccaacttctatactgtttgattttagaatctttgctgcattcacagaactaagctgtgctgatgtaaataatatattctgaacaagtcttctggttttctttccattattttctacaaatggatgacactcagaaaatgttttcttttcacatttgcaattagaacaaaacatttttctagttttcacaagaagtattacctttctattttgcataggaagatcttgaatttctctttcataagatgaatgtacctttgatgaaagagtaccacaataaggacattttacttcactcatcttggagctaatataaaatacagcaatattatttttgatatgatatttgtcaagttgataattcggatctaatgcagtaataaaatctttcatttgtttgctacctccacctatatacatatcatatcaatttaatactttgaattcaactaacaatggaaagaacctattgagcgtttactttgtactgatgtgcgtatttgatgatttccgcaaggtctttgatgcggtgttccagttctgcaaggaagccgacttcattatagctctgtgcggcaatctttaaattctcgatggcagcccacctttgtagtcccggactgttctgaaatttctcgtcagaggtgtcaataagtctgcgggcagagtagtcttttttggggataattgcctttcgttcccgttttctttcaatgcgttccctgatccgttcctttgtgcattcctttcctaaagacttcgcactgccacgcacaaaacgctctttatccagagggcggaatgagatgtatttggcagctccttcttcaaaagtttcccctttgatttcataacctttggctctcatcagaagcagaaattcttcgtaagtggaagccgacttgatgcagaaattgatgttctttctgatctgcgttttccatgcagaaccgttctgctcggaatgccattctttgtattttctgccacgctgcgcacccggaatgatgacggaaagattgtgttccttgcacagttcatcactcagtttccggatgtggtaataggactgtttgcagtcgtgatatttgttatgttcgatgttatcagcgacgcaaaaaatgatgtgattatggacgtgtcctttatcaatatgagtggtaacaatatacgaatattttccctctaaaagtttatctgcaagctcctttccaatgcggtgcgcttcttcaaaaccaacctctcccggagcaaaagcttgtatcagatgataggctttgttaggactgttttcccggcagtggtcgagggtatatttgaagtcataagctgcgatttctggagaacaggcataagaggaaacaaacattttttcatcggtcttttcggggttgcagatgtagtctatcgctttatcaacggttgctttgatagcatggatttttgtgtacgccatactttattcatcaactcctttacttcgtttatatcctcttgataaatgtttccggtgctgtttaccctctttgcgatctggtttaaattggagttgatacgtcccaactccgtattataatttcgcaggtaactgtaatcaacatcatacacatatccatataagatcagcttgcgcaggaacgcagacatactcttcatgccggatgctttgaattcggtgttgaggatgtactgctcatcatcgctgagataaaattgcaccggattggcgcggtttcgatttgtcatttctgccacttcctttctgattttgggtacaaaaaaactgctgtaaaatgttcgatttttacaacagttcgtttcaggttttattcagttttgggcacaatcacccacagcaaattgtagcaaagaaggtaggaaaggtcaatgcatttcgacggtaaaatgaagaataaccgaagaaaaatcgagagagggttagagatacttccctatggaaattcgaccacacagacgataggaaagtgtgggggatttcgcctgtgtcatgacacaggcagtgcttccggtgcaggattgtgtggtgtgggaagtattactctaagcggagaaaaaggtagtgtttgatttatttgatatttctgaaaggggttgagataaaatattggtttaatcgtttcattcgttttaagaaaaaatgaggaatcttttaatcattttaagtgcataactcgttattatatatatacagatattcaatggaaaggagtctgatgcgtgttgagtgatgacgaattagtggaacagattctacttggaaatgaaaatgcagcagaagaattgataaaacgctattatacatctattttacgttactgcaggtggcattgctctaatctggaaaaagcagaagacctgactcaggaaacatttttgaagttgtttaagaatttatccggatataaagggaaaaagaaatttaaggcttatctatacacgattgcaaatcatttatgtattgatgaaagtaggaaggttgagttttatccattagaagatgaagaaaatatagtgcatgagtataacgacatagttcggctagaggatagggcagagataagctattttttgaattttttatcatcagaacaaagggaagcagtcattctacgctttggagaacaacttagttttggagagattgcaaaagtgatgggatgcaatatgcgaacagcacaaagcagggttcgtaatgctttaaaaattatgagaaaggagcaggaaaatgaaatataaaaatttgaagggctatttacagcaatctttaggagaggaagtacagcctaaaagattagaggaaacgattaagctttgcactgaaattgtgcgagaacaggaagtgactagggcagaaccgaggacaggtttctttcactatctttcagatgtatttcgttttgaaggtattccaatatttggtttgcaggcagtaacgttatttatagtttgtttaacaattgccagcattgcagacgtgccaaagaatataccaatttttatgccgctgtttgtattggctatcataccagcaatttttaaaagccagtattatggaatgagcgagattgaagcggtaacaagagcttctggtgcccaaatcacgttagcaaagctggttctggctggggcggctaatttagtgtgtataacaattcttttgtgcatggaagtttatttgcaaaattcttataaagagattggacagatagtcctatactgcctggttccgtacttagtgtgtatggttgcgttgctacgtttgatccgcttgcaaaagaaacagagtttacagatatgtgcgattgtaatgttgggttcctgcatttgttggggtatgtcagcaaggatattgccatggttatatgaaacatcagcagtgggggtgtggattgttacatttttgatttttgctatgttctttataaatgaaattcattatattgcagagatgagaaaggaaggaaaaatgtatggaattgtcgcttgatcgtttaacaaaacagtatggcaggaaaatagcggtagattgtgttagtgcgaccttaaagccgggagtatatggtcttttgggggctaacggtgcaggtaaaacaacattgatgcgtatgctatgtgctgttttggagtcaacctcaggggaggtattgctggatggaaaagaagtaacttcgatgggggcagattaccggaatgtgttgggttatttaccacaggattttggatattatccaaattatactgcggtggagtttttaatgtatattgcagcactgaaaggaataccgaagaatgttgcaaaaaaacgtgtgactgaattgttggaggtagttgatttaagccatgtggcaaacaaaaaagtaaaaactttttctggtggtatgaaacaaagagtaggaattgcacaggcgttacttaataatccgaaaatcttgattttggatgagccgactgcaggacttgatccgaaagagcgtgtccgttttcgtaatctgctctcagagtatgcaggcgataaaattgtaattctttccacacatattgtatcggatatagaagcaatagcagatgaagtgctattgatgaaaaaaggaaaagttgtattgcagggtacggttccagagttgattcacaaggcaaatggtaaggtttgggaactttctgtttctccacaagaagctagacaatggcagacaaaaacaacggttgctaatttacggcatgaaggaaaagaaattatattgcgtattatttcagacaatatgcctagtgagcgagcggttccttgtgaagctacattggaagatctttatttattttattttcctacagaggaaggagtgaaatagaatggaattattttggttagagcataaaaagttatggcgaaagaaaattgttaaaatatgtgtgttgttgtgttttgtttattatgtaatttttggaagcatactttcgtttcaatggttcggttttggcagttcaggtgactatacaagtgcttttggcaataattttgatggatatacagtaataaaggatagtcaggaatatgcactttcatttggtggagaattgacggatgaaaccttgcagcaaatagtaagtgattatcagcaaatggaagctgacggtatggaggaagaactggaaaagacagactggcagatagttaatagttggctcggaacattgtatccggagcttcgagataccagtaattataaaacgatgataagctatgttgatccggataagttaacaggcttctatgaaagaagacagcaggtgcttgatgagtttttggaggtcagtggtcaggtaggagctgaaaaagagtttttacatcagatagagagaaaggtagaaaaaccatttcattatgagtgggtagaaggctggtcaacgcttcttggtagtatggttgcggatctaggagttgtgatggctttgtttctcggtattgttttatcctctttatttgcgggcgaatggcatgataatacaagcacactagtattgacgactcgaaatggttgggggaaaatcgctcttgccaaaattcttactggtttagcgtttacagtggagttatttgcattacttgctgtttcaaatgttatatcacagttgttttttatgggaactgccggatgggatatgccgattcagaatatcaagctgattgctgttgcacctatgaatatgctgcaggcagaaatttatgaatatgcctttgtactgcttggagcaataagttttgccggaattgttatgtttatatcagcggctgtaaaaaataatgtacttaccttactgcttagtctggctgttgtatatggaccaatgatgattgcagaatatcttccttataaaatgcaaaaagcattggatttaataccattggtaggaagttcaacagatattttcagaactaatacttttcgtattttggggaagcttatctggtcaccatatctacttattactattcctgtcttgattggtattctatgtatgccattcgctataaagagctggtcaaaaaggatgaaggcataaataacaatatggcaaagaaaagagataaaaagaataagttgcgaggaaaatggttgagaggaattatcatagtttacttgcttttgatactatgtaatctatttcacgaatttccttctcgattagggaatttacatagtattccagtttcggaggagtggtattcaattgtaataaaccgttggaatgaaataccggaagattatagagtggaattaacagagttatcgaatggtcaaaaggtggatagcaggatatatacgtatttacaagaaatgtttgatgcagcaaggaaagatagaatatatccggttgttcgggaaggttatcgaacttatgatgaacagcagaaaatattagatgataagataaaggcttatataaatgaaggatattcacagtcaagagcagaaagaactgctaaggaatgggtagctttgcccggaacaagtgaacaccaattaggcattgcagttgatattaatgctgataaatcaaagagctcaaatgatgaggtatatacgtggcttgccgcaaatgcacataattatggtttcatattacggtacccacaagggaaacaggagattacagggacaagctatgagccatggcattatcgttatgtaggagtagatgcggcacgttttgactttccttctttttctttcttcaaaataaatctatatataatggcggtactgtcgacctaaaagctttagttctgcgtaaatactttcttccggttcatattctttcagtcgataccaatgatcaattcctacacttatcatctgtaacctcctaaaaaatctgtaattgtcccatccacacttattaccactcattttagtttgttacacgaaagcaccttgcgggtttcaacctgcttaaacgaccgcttataataaggggcggttgacggtttttatgacggatgtggttaatccaaaaagctgctcgccagaccaattactcccttatcataaaaaaataagtgcagaagataaagcactaatggtatactttatctcttacacttatatggtactaaatggagctattgctccatagattgattactcatctattttgcaacagcccctttgtctttgatgaataaaggtcaattttttatttaactattctcactattatttgattcagtgatttttttcttctttggagaaacaagtttgtgaccagaataaatggacatgcccatacaaagcaatgaagaataggcaaagtatttatgtgcagtcatagattttttgattccagaataaatgcatcccaacatacagaaaagtgcgcctaaggaccagtatttatgtgatttcatgatttgatacctcctgtgatttaactgattcaatcataacgctttttttacgtaaatgcaaagaaaaactttgaatatagttctatagaattagaacttggttttgcgattctgtatatttaagatatccacaagtatactaaattcagaatgattattcgttctggaggaggtgttacgatgtatttgaacgcgaaataaaatagttattcaggtaaaagatgctcagtttgttagtttttataataatgagaattattactatttttattgacaacaggataatagtggtatataatccttattaagaactaatcctaataaggaggagaaatgacaagtaggagaaataccattcaaaaagatcttgtaagaaatgccgtatacgaaatgagaagacatgttacagcaaatgaagtgtatgaatttataaaagaagcatatcctacaatcggaaaaggaactgtatatagaaatcttgatatattggtagatgagggttcgttaaggaaggttgaagttccggatggaccgaaccgatttgattttacattgaaaaatcattaccatgtaagatgtataaagtgcggtgaagtttttgatgtggatatggatccaataccggatttgctggaaagaattcataacactcatggaattgaatttgtggattatgatatttcatttaaaggcgtttgcccgaaatgcagggagaaggtaaaggaggaacagcatggatagctgtgacagttactaaaacagaggacagtcagacaatatggcgttgcagaatttgcggatatgaatatgtaggcgaggaattaccagatgactttatatgtcctttgtgcaagcacccggcatcagattttgaaaaagtagtaaagaaaacggaggtaaaagagatggaagcaaacaaatatgcaggaacacagacagagaagaatttacaggaggcatttgcaggggaatcacaggcaagaaataagtataccttttttgcttctgtagcaaaaaaggaaggttacgagcagatgtcagcattgtttttaaagactgcagataatgagaaagaacatgcaaagatgtggttcaaggaattagcaggaattggtgatacaaaggaaaacctggcggcagcggcagaaggcgaaaattatgagtggacagatatgtatgaaggctttgctaaaacagctgaggaagaaggattccctgagcttgcagcaaaattcagggcagtaggtgagattgagaagcaccatgaggaaagatatcgtgcacttcttaagaatattgaaactgcacaggtatttgaaaagagcgaagttaaggtatgggaatgccgtaactgcggacatattgtggtaggaactaaggcgcctgaagtatgcccggtatgtaatcatccacagagctattttgaagtacatgaagaaaattattaaggagatgagattattatgaagaagaaagtgattaattcaaaaaaagcagtaatgataggctgtggctttgttggttctgcatcggtatttgctctgatgcagagtggcttgtttacagagattgtccttatcgatgcagataagaacaaggcagaaggagaagcgatggatatcagtcatggtattccatttgcgagtccgatgaaaatatatgccggagattatgatgatgtggctgatgctgcaattgttgtcatatctgccggagcgggacagaaaccgggagagacaaggcttgatctcgtaaataaaaatgtagcaatatttaagtcaatcattcctgaaatagcaaagagaaattttgcaggtatcatgcttgtagttgcgaatccggtagatatcctgactcaggtagccataaagttatcaggacttccagaaaacagggttattggatcgggtactgtgttagatagtgccagattaagatataagcttggtgagcatttatctgtggacagtaggagcgttcatgcatttatagtaggtgagcatggagacagcgaagttgtagcatggtcatcagccaatgtatctggtgttccattaagtgaaatgtgtgaaatgcgtggacattacaagcacaaggaaaacacggcagaaatagctacagcagtcaagaacagtgcgtatgagatcataaacaaaaagcacgctacttattatggaattgcaatgtctgtaaaaagaatctgcgaagtgattatgagagatgaaaaatcaatacttcctgtatcacacatgattcatggagtatatgatattgacggagtatcgttaagtatgccagctattgtaggtgcagatggtattgagtctgatatacctattaatttaagtggcgaagaagcgttaaagcttaaggaatctgcagattcattgaaaaagattatagagacaattgaattataaattttacacatggacggagaaaaaggcatggaagtaaggtactgtatttgtaagcattgtggaaacattgttgaaaaggtaaaggataagggtgtacctgtaatttgttgcggagaacctatgcaggaattaaaagccggagtgacagatgctgctgttgagaagcatgtacctgtatatacggtagaaggcagtcatgttcatgtcgtggtcggagagacaaaacatccaatgcttgaagaacatttcattgagtggattacattaaatacaaaccagggaatatacagaaaacagttaaatccaggtcaggagccggtagcggatttttgcctttgcgatggagaatatgtagaagaagtatacgcatactgcaatcttcatgggttctggaaatgctaaaaacagttgatattcatgctaagattacaaaacaattcagatacaacagtaatatatgctgtgtattaatatatttataaggaggaacaaactaatgaaatatgtatgtgacgtttgcggatgggaatatgatgaagaggaaggttatcctgaaggtggtattgcaccaggaacaaagtgggaggatgttccggaagattttgaatgtccattatgtaatgttggaaaagatcagttttcagaagttgaatagaagcctaatcttgtgttaaatacggatggataaaccaaaaccctggtgcgtgagcaacagggttttttattgcgatattttgtgatgatatcacagaaaataatctaccttttgcttataatgtagctagaaactaagtgaggaggtagtctaaatgagattaaaagacaaagttgcaatcattacgggtggaagccgtggcataggatttgctacagctgataaattcttgatggagtccggctttctatatccggaagcgccatttcctatgtcggcaaaaagagcagaaatcgatcttggaatgtgttggtatttttgccgatgatgtgatatactatgtaatagattaacgtagttttttggatagattttatggcggaggatcatagatgcgatatctttcagttactgaaatagcgaaaaagtgggatgtgtccgagcgcagtgttagaaattactgtgctcatggacgcgtaaacggtgcatttcttaccggcaagacctggaacattcctgagaatgcagagaagccggagcgttccaataaaaagaaagagcagccaattatattgctggatattctacaggagcagaaggcaagtatgtattccggtggtatttaccataagacacagattgacttaacatataactccaatcatattgaaggcagccgcctgacccacgatcagaccagatatatctttgaaaccaacaccatcggtgtagaaaaagatgtgctgaatgtggacgatgtgattgaaacagcaaatcacttccggtgtattgatatgattattgataatgcaaaggcagctctgacagagaagtttatcaaagaacttcatctgatcttgaagagcagtaccagtaattccagaaaagattggtttgctgtaggcgattataaaaagatgccgaatgaagtcggtggcatggatactgcacttccggaagaagttgcagataaaatgaaagcgctgcttacagagtacaacggaaaagaagaaaagacttttgaagatatcctcgacttccatgtgaagtttgagagaatccatccgttccaggatggaaacggccgtgtaggcagattgattatgtttaaggaatgtctgaaatataatatcgtgccgttcattatcgaggacaatctgaagatgttctactaccgtggactgaaagagtggaacaatgagaaaggttatttgacagatacctgtctgaccgcacaggataagtataaggcgtatttggattattttagaattgcatattaaacgtgattcaaagtgaaaaatttgcgctttgagaaatgataaagttgaacaggtatatgaaaaactggaaaaacagataaatcatcagccgctttctgagttgtttggtctttttgctgttactaatgcggaaaaagtaattcttgagcgtattcaggaaaaacagggacagataaaagaatatttaaagaatattatggctgaaatagctctgataataaggaggagcgaatgatagatatagaaaaaatgggagtgagatatatggagcaattactgattgttgaagatgatatcggtttgaatcaagggttatgcaaagcgctgaaggcagatgctcggcagatcatttcctgtcaagacctaaaaacggcgaaggagcagctactttgcggcggtgtatccctgatcctgttggatatcaatctgccggatggcagtgggcttgagttgctccgggagatcaaggaaaacatgcccgggattcctgttattctgctgactgccaatgatactgatttggacatcgtagacggattggagagaggcgctgatgattacattaccaagcctttttctctttcggttttgcgggcaagggtgaatacccaactgcgaaagcaagcgtcaagccataaaaatgcgccgatttgtattgatctttttcaatttgactttgaggcgatgaccttttatgcgggagatttaaaagtggaattgagtaaaacagaacaaaaattactgcgcctgcttgttgaaaaccgaggtcgaaccatggcacgtggagaccttgtagaccggatctggacagatggcgcagaatatgtggatgaaaatgctttgtctgttacgatcaagcgtctgagggataagcttggtgcacagaaatacattaaaaccgtctatggaatcggttatagctgggtgacaaaagatgaatagaaccggcattgtgatcatactgctgtgttttctggtggcggtagctgttgtattatgggagcggagaaaggccagaaaaacgatggaagaaatcgaaaggatgctggatgctgccatgaccggctccttttctgaaaccaattttgatgaaagccggctgtctgctttagaaacaaagtttgcacactatctttctgccgcagaagcatcttctcgaaatgtagcgcaggaaaaagacaaaatcaaatccttgattgcggacatttcccaccagacgaaaacgccgattgcaaatctgctgttatacagcgagcttttgatggaggaaactctgcctgcatcggcgaaggcaaatgtggaggcgctgtacaaacaatcggaaaagctgtgatttctgattgattctctcgtaaagctttccagactggaaaacgggatcatttcacttgcccctcagcaagcagcgctacagccactgcttgaaagcgtagtagaacaatataccgccaaggcttctgaaaaaggattgtctttgcaattgcaggataccgatgcttttgctgtattcgacttcaaatggacagcggaagcgttggctaatatcgtagacaatgccattaaatatacggagcatggcacaatcaggatttctgctgtaagttacgaaatgtttgcaaggatcgatatatcggataccggttcaggcatcccggaaactgagcaggcaaagatctttgcccgcttttatcgttcaaagtccgttcgggagcaggaaggggtcggcatcggcttatacctttcccgacagatcatatccggcgagggcggttatattaaggttgcttccgttccgggaaaaggaagtgcgttttccatatttctgccgaaataacaacaattctttcaaaactgttagatttttttgcgccctcgcaagaatgtggaaagaatcctatgcgataatctgtatgtgtaaaaggatcatttcctttcatacatacagattttttcatggaggtattcatttatggaagttttacaggcaaaagacctgaaaaagatttatggctccggcaataacgcagttcatgcgttggatggagttgatttaagtgtgaagaagggcgaatttgttgcaattgtcggcacgtccggctccggaaaatccacgttgctgcacatgctgggcgggctggatcgccctacaagcggtacggtcatggtggacggacaggatattttctccctgaaagaggaagcgctgaccatcttccgccgcagaaaaatcggctttgtatttcagagctacaatcttgttccggtgctgaatgtatatgaaaatatcattttacccattgaactggatggtggaaaggtaaacaagaattttgtgcagcagatcgtgcagacgcttggactgagcgaccgcttggatgcgctgccaaatcagctctcaggcggtcagcagcagcgtgtggcaatcgcccgtgctttggcggcagcacccgctatcattctggcagatgaaccgacaggtaatctggattccaaaaccagccaggatgtattgagtcttttgaaagtcacaagtcaaaaattcgcccagacaatcgtaatgatcactcacaacgaagaaattgcgcagatggcagaccgcattatccgtatcgaagatggtcggatcgtctcagagaactaacgggaggtgactacgatgaatgtcaaaaacagaaaatgtattcgaaagctcagcttaaaatctctttatgcgaaccgtcgccgcaatctgatcgctatttttgccattgcgctgacaacgctgctatttacttccatgttcaccattgtcttgtcactgaacgccagctatgaaacctaccagtttcggcaggtaggcggctatgcacacggcacctttaaggatgtttcccccgagcaggcggaacgcatcgctgctcacccaaaggtgaaggctacgggggtacggaaggtaatcggtatcactgcggagggggtctttgccaaaataccggcagagatcagctacatggatgccaactgcactaaatggagctatgcaacccctactatcggacggatgcccgaaagcggcaaagaggtggctatggatacgacagcgttgcagctgcttggtgtgacaccggaactgggcgccgaggtcacggtttcatattccatcacggacaaagatcaaaccgcctttactgtaacagatacctttacgctggtaggctattgggactatgatgaactaatgcctgttcactacatcaacatcagccgtgattacgcagatgacatcgaagcgcaggcagtgaaaacagggttacagcctttccgcaccgatttgaatgtcatgctggcctccggcacaaatattcaagggcagatggagcaggtggataccgatcttggctacacctgggacagctatactgatcccaacagcgtccggatcggcgtcaattggggatatacctcatcccagctggagtcgcagctcgatccagagctgataattgccatagcagcttttttgctgctggtgattttcacggggtatcttatcatctataacatttttcagatctctgttgcaggggatatccggttttacggacttctgaaaaccattggcacaacgccccggcagctcaaacgcatcattcgccagcaggcacttctgctttgtctgatcggcattccggcggggctgctactgggctacggcatcggtgctgttctgatgcctgttgtcttgcgctccaccaagttggatgcaggcatcaccaccatcagcacttcgcctgtgatcttccttggttccatgctgttttccctgttgacggtgctcttgtcctgttccaagcctggaaaaatggcagccaaggtctctccggtggaggctatcaaatatacggatgcaatgcagactaagaaaaaacagcgcagcacccggggggccaagctccatcagatggcctttgccaatctgggacgaaacaagaaaaagacggtgctggtggtgttgtctctggcactgtcggtgacactgttcaatgcgctgtgtgcctttgtgggaggcttcagcatggagaagtatgtatcctccatgacctgcgccgattttatcgtcagcactcccgactatttccgtttcaacccggcagatgaattcatcacgccagaacagatcgaggagatcgcagcaaacacaaaggccagtctttccggcacgggatatgctgtgcgaaaaaccgcatacctgtggatgacggaggatgctctgcggcagaactatgcaaggtacgaaagcgccgagcagttagacagccatatgagccgcatagagcaccgggggaatatggtgatgggagatagcagaatcgaggctttggataacagcctgtttgacaagctgcaagtgtttgatggagatatttctcctatgttgaagccggacaatagcgccattgccattgcggtttctttggatgattacggcaatctgcccaatcctgaatactaccccgaggttggagacacgatcacggctacctatgcggatgatgtgaaatatatcgacagccgcaccggagaactctgcaccgaagatacaccggaggagtaccttcaggcaaaattgtatggagccagagatgtagagtacacggtatgcgctttggtagaacttccgtattccatgggttatcgttatggtggtgatggctatgatgcagttttgtctgtggacaccgcacagagggacagcggtggtgcgaccattccgatgctctacctgttcgacacagcggacgaaactgacgaggccgaagcagagcaatatctatcgaagctcactgccggtgagttttcgcccttgatgtatgaaagcaaggccacggctcgctctgaatttgctcagttccggcagatgttccttctgatcggtggtatcctctgtgctatcattgggctggtgggactcttaaatttcttcaacgccatgatgaccggtattctttcccgccgccgtgaatttgctgtgcttcaggctgtaggaatgacgaaccggcagctcaaaaccatgctgatctacgagggattgttttacgcaatgtcctccgtagcggtggcctttattctgtcgctggcagtgggaccgcttgcaggaaaaatgctgggcagtatgttctggttctttgagtatcagttcaccgttctgcctgtcctgctgacaattccggtatttcttctgctggggttgctgatcccctgcatgatgtatgacaatgcagcaaaatgcagcgttgtagagcaattaagagatgctcaataactgttaagccaagggttggaaggcatagacggttagaaaataacccacgggattttatgcagatattacatgtaaatatagatgattttttggacataacatgatagaatggttacaacaaaaaaaggagagcacccatgaaaccaagaacagaaatcagcatgcagctctacaatctgatgatggaacgaggttacccagagaatttatgtgatcttgtcaccagaaatctgaataccgattatacagcaacaagaatgatcggatatttatcccattattctgatttgccggatgtagaagttgtggatgaaatgcttgctattttaagtgaccgtaacgagcttatcaagaaaaaagaatctgaacaggcacaggccagaatcagtgagatttacagatttggattagatattaaataaaagtggaatagataagagggagcaaatctgccccctcgattatttttgctctaaaatataagctaataaagcgtcgcaaccttcatttacgtctctgtatgttgcatcaaaattcccagtataccagggatctgcgatatcagcgcctttacgtgatgtgtaatctaaaagcttagaaaccttaccatccggatcacctttaagcatgcggttaagatattttatattgatcgaatccatacctatgatataatcgaaattatcataatcggaaaatgaaatctgttttgcacgatgtggtactaaaggaattccaacttcttttagtttgtttactgtacctctatgcggtggatttccgatttcttctgtgcttgtcgcaaaactgtctattacaaactgatcactcaaccctttttcttttaccttataggtaaacacgctttcgcttaaagttgatctgcaaatattcccccaacatacaaatgctactcttattttcatgatgtacctcattcttctaataaatataccggaaatatttctccctgtttcttacgcatccaatgcataggagagaagctttttcaaattgtgatgaaactgacgtttatatgcatgcagttttttcttctcagaaacagaatagtgtttctccacgtagatatcatatcgtttgaacaaatttcggaaatccgtatcctgtttttgtccccaacggaccagtacccagttcatggcatctatattccagtattcgcttggaattcctgccattttcaatgtggtaatctgacgcattgcctgcatggaaaggcggctgagctggcgttcacggtgcatctcatccggatcatttttcccaagctttttcattaatttttgagagagtgtctttgtcttggaagcacgttccattacacgaacactttgatcaatgatatcctggagctgcacggctgcattccagtaagtcacgaaagaaacggattctttctcatcttccggcgtaagtttaaatgtcttaaaaacacggtctgtaactccaaaaatttccagattataagcttttcttttcgccggattggaaagaacccggtaggcttccagaatctcctgcataaaagcagttgtatctatatctttatgcatattggcatccggatggtagaccttagccaatgcatttttcgctgaagtaatttcttccagagtcgcatctctggatacacctaagatatcgtaataagtgcgtgagctcattttgacctcctaatattagattccatctttctgaaatcatagaaaatggacagtacttctaatatacgcctgtaaaattgaaaagtcaattctctccagacatatttcccctccatcgctactatactggtaaaagaatagtccatgggggaattgcagatgaagaaaggttttacagtgattctgctgactgtttttctgctgtataggattacatttccgacaagtgtagtccacgcggaagaagtagaaataagtgcgccgtctggtattcttatggaaatgtctacgggaacggttttatttgaaaaagatgcagatactgcgcggccaccggcaagtgttacaaagatcatgacaatgttgttaatctttgatgcattagaaaacggaactatatcacttgatgatgaagtgtcaacttccgagtatgcagcttctatgggaggatctcaagtattcctggaaccaggagagatgcagacggtaggtacgctgctaaaatgcatttctgtcgcaagcgcaaacgatgcatgtgtaactatgagtgaatgtatctgcggtaatgaacaagaatttgtgaaacaaatgaatgcgcgggcaaaaggacttggaatgaaacatacaaacttcgtaaactgtaacggattagatacagatggccatgagatgagtgccagagacattgcactcatgtcgcgggaactgatgaccaaatatccgcagataaaggactactgtacggtctggatggaaaatatcacgcatacaactgctcgtggttcttcagaatttggcctgacgaatacaaataaactgatccggcagtacgaatatgcgactggtctgaaaaccggatccaccggaaaggcaaagttctgtgtatcggcaacggcaagtaagaatggtgtggatctgatcgcagtaattatgggcgctgaagattcaaaaagccgttttaaggatgcggtaaccttattgaattatggatttggaaaatgtcagatttataaagcaaaagaacggaaactaccagaggttctggtgaaaggtggcaaggaagaacatctgaagattcaatatgaggaaggatttacttatgtagatacagaaggatctgatttatcgaaagtcgaagaagtaacagaaattccagatgaagtaaaagcacctgtgaaaaaaggggacacagttggccggatttgttatcggataaacgggaaagaaatcggatccgtaaatctgatcgcttcaacacctgtggaaaaggcagattttggagattatctaaaaaagatttggaagaaattattataacacttgtcgggaacatggaaaatgttttataataaaggatacgagtgcgggtagctcagaataattttcagtctgttttatgaaattttactacccgcaatggatataaaaatacaggaggcagattaaattaatgattacagaacgtattgatcatacattattaagagcagatgcaacagaggaagatatccgtggattatgtgaggaagcagttacgtacggatttcattctgtttgtgtgaattcaagttgtgttgcgctttgtgcctctcttctgaaaaatacaggaattaaagtatgtaccgtgattggttttccgttaggagcaatgtcaacaactgcgaagattgcagaagcaacagcagcagtgaaagacggtgcagaagagctggatatggttatccatattggggcattgaagagtggaaactgggattatgtaagaagagatatcggtgcagttgtcgctgctgccggggatgacgtgattgtaaaggtgattcttgagacatgtctgcttacagacgaagagattcaggaggcttgccttgtaagccgtgatgcaggtgcagactatgtaaaaacttctactggtttctcaaccggcggagcaactgtagaagcagtttctcttatgaagcgtacggttggctctgacatgaaggtaaaggcatccggtggtattcatacactggaagatgcacggaagatgttttatgcaggtgcagaccgtattggatcaagttccggtgtggcgattgcagaagctgagatgtctgagatacatacgatatgagcatcctaggttttttcacagttctttttctgattgtgtgcgcggttatattagcagaaatgtatcgggagcagcattctttttgtgtaacacattacgaagtacattcaccaaagataacctgcgcagcagaaaaagactcggtgaacagaattatttttttaagtgatatgcacaaccatgtttatggtaagcagaacaataaattgttcgaagttataaaagcagagcagccggatctgattttgattggcggagatatgctggtagcaaaaaatgacgtgcgataccaagaggcactggattttgtcagtcgtctgccgcagctctgcccggtttattatgcgagtggaaatcatgaacagagaatcaaagagaatcaggaaaactattctttgtgttatgaagagtatcgtaaaacgttacaggcagaaggggttcgttttctggaaaatgaaagttgcgatattctgttgggaaatcaacagattcatatcagcggattggaactcccactgattgtgaataaaaaattccgcaaggcggatgtcaccgctgaagatgtacgcagatgcctgggagaaaagcatactgcaggaaatcgggaaaaacagcaggaaacaacagagaatttcgcagacaacagttatcacattctgcttgcccacaatccatcctatatggaagcttataaggaatggggtgccgatctgattttgtctggacatttacatggaggatgtgtacgcttgccgggaattggcggcgtgatcactccgcaggtatttctttttccaaaatattcaggagagatgaccgtggagggagaacagacgatcatcgtcagcaaagggcttggaacgcatacatttaatgtgagactgttcaatccggcagaagtgattgcaatcaccctttgcagataaaaggagattattatgggaataccggtaaaactggaagtatttgaagggccgttggatctgctccttcatctgattgagaagaataaagttgatatttacgatatccccattgtggagattacgaatcagtacatggaatatatccgtcagatgcaacgggaagatctgaatgtgatgagtgaatttcttgttatggcagcgacgttgttggatattaaatgcaagatgcttcttccaaaagaagtcaaagaagacggagaggaagaagatccaaggcaggaactggttgaacagctgttacagtataaaatgtataaatacatgtcttatgagctcagagaccgccaggtagatgcggatctgattttatataagaatccaacaattccggaagaagttctggaatatgtagagccagttgatcttgaccttttacttggggatctgacaatggtacagttaaagaaagtttttcaggaagttatgcgtcggcagacagataaagtggatccggtaagaagtaaatttggcaagattgagaaagaggaagtttcactcacagataagttcctttatgtgcgtgattatttacaggaacaccgccggttcagtttccgtcagcttcttcagaagcagaagagtaaaatgcatattgttgttacatttcttgcgattcttgaaatgatgaagctgggtgaaatttatgttgaacaagaatctacttgtggtgagatcatgattgaaagaaaaggagacgtagtgtaaatggcaggagtaaaaacacttcaggctgcaattgaagctattttatttacaatgggagagtctgttgaactaagtaaaattgcgaaagcaatcgaacaggatgaacagacaaccgaagaattacttcaggatctgatgaagaaatacgaatcaaagaacagaggaatccgcatcattgaactggacaagtcttatcagatgtgtacaaagaaggaaatgtatgactatctgatccgtgtggcaaagcagccaaagaaatatactctgacggacgttcttcttgaaacaatgtcaatcattgcatacaaacagccgatcaccaagatcgaggtggagaagatccgcggagtaaaatctgatcacgcagtaaataaacttgtggaatatggtctggtagaagaagtcggaagacttgatgcaccgggaagaccaattcttttcggcacgacggaagaattcttaagaagattcagtgtaccgtcgattgatgatcttccgtcattgaatcccgagcagctggaacatttcaaagaagaagcagaagatgagacaaagatccgtatggatatttgatttttgaattctacaacttgcattggaatcataaaataaaaagaagaatggagcttccaatataaacaggaaatcaattgatgatagaatttaaaaagtggtatttcagaatctatttattctttgttcgcatactgattgtcagcatgatcattggaatttcttttccggttcatgtttttggaactacatctgatcatgcaggacaaaactggaagataaatgtcagttctaacgaacgtcaggtagttccagatgagctaaaacaattatacgccctgtctgccgtcttaatggatgcagacagtgggcgtattttattttccaaaaatggacaggaagaacgggcaatggcaagtacaacaaagattatgacttgtattcttgcattagagagcggcataatggattcggaaaatcagattgttacagtaagcgatcaggctgctacgcagccaaaggtacatcttggaatggttgcaggagaacggttctatttaaaagatcttctttattccttaatgctggagtcacataatgactctggggttgcaattgcagaagctgttgccggaagtgtagagaaattcgcagatctgatgaaccaaaaagcgcggatgatcggctgttattctacttattttatcacaccgaatggattggatgcagcagattcaaatggaatccatcacactacagcagaagatcttgcaaggatcatgcgttattgtattatggattctaagaaacaggaagattttcttacgatcacgcgtaccaaaacctatcagtttcaagatgttgaaggaaaacggtcgttcagctgttataatcataatgcattcttaaatatgatggacggcgctctttccggaaaaacaggatttacttcagatgccggatattgttatgtcggtgcactgcgtagagataagcggacatttattgttgcacttcttgcctgcggatggccaaataataagagttataaatggtccgatatgagaactcttatgacttatgctttggatcattatcaatataagacatttgaaattgaattacctgtccgacagatatttattaataatgggataaaagcacattcagatacgatagcttatcccggtaaaaacggaaccaagatttctcttactgcaaatctgacacctgtttctttcctattgaaagaagatgaaacgatttctgttgactatgagattcctgatcagttggatgctcctgtaaggaaaggaatgcaagtcggcaggattcgttgcacgttaaatgacaaattgatccgtgaatatcccgtctatacaacacagaatgcagaaaagagaaccttaaaaaaatgtgtggaatatattttctacctgttttctatacaaaattcataccaaaaagcaggaaatgttaaaaaagatcaagcgaggtgattaaaatagtcactacaatctaagactttcctgtgctaatataaacgagtgttaaaaaacaacaactaaattgattaaatataagagaggtacacattatggaaaactggaggaaatacgaaaagacttactttatgccacctgagccatgttatgactgggtaaagaaagattcaattgacaaagcaccaatctggtgcagtgttgacttgagagatggtaaccaggcactgatcgagccgatgagtctggatgaaaagttggaattcttccagctgcttgtggatgtaggattcaagatgatcgaagttggattcccggctgcgtctgagacggaatatcagtttttaagaacattgatcgagcagaacatgattccggatgacgttacgatccaggttctgacacaggcaagagagcatattatcagaaaaacatttgacgctgtcaaaggtgctccacatgctattatccatgtatataattcaacatctgttgcacaaagagaacaggtatttaagaaagataaagagcaggtaaaacagattgcaattgacggtgcaaagcttttgaaagagttagcagaagaaacagatggaaactttacattccagtacagtccggaaagttttcagggaacagaagttgactatgccttggaagtctgcaacgcagttcttgagatctggcagccaacagctgacaacaaagcaatcatcaacctgcctacaacagtggaaaatgctatgcctcatgtattcgcaagtcaggtagagtattttaacaagcatctgcgcgacagagagaatgtaattctttctctgcatccgcacaatgacagaggatcaggagtttcagatgctgagcttggaatccttgccggtgctgataaaattgaaggaacattgttcggaaacggagagagaacaggtaacgtagatattattacacttgcaatgaatatgttttctcagggtgtgaatccgggacttgatttctctaatatgagtgacatttgtgaagtctatgaacgcgtgacaagaatgaaagtttctccgcgtcagccatatgcaggagatcttgtatttacagcattctccggttcacatcaggatgcgatcgcgaaaggtatgacctggagagaggagcatgactgtcagacatggactgttccatatctcccgatcgatccacaggatgttggcagaagatacgattccgatgtaattcgtattaacagccagtcaggaaagggtggcgtaaactatatcctgaagcagagctttggaatcagcttaccggagaagatgagagaagaagtcggatatcttgtaaaagatgtttccgacaaggctcacgaagaacttacaccagacaatgtatatcatatctttgaagaccattacatcaatgcgaaaccaattttcagtgttgatgaatgccactttaaacaagaagatggaattgtcgcagaagcaacgattcaccacaatggaagcaaccgcaagatcacaggtgttggaaacggacgtctggatgctgtcagcaatgcgatcaagcattattttgatatcgaatttgaacttgcattttacgaggaacattctttgacaaaaggatcttcttccagagctgttgcttatgtcggtgttatttccaacaagaagcgttactggggtgtcggagttgatgccgatattatcaaagcatctattgaagcactcgttgttgcagtgaataaattggatagcgtacagagatcccagacatgcaaggatgaaagattattagatattacaaattatatttacgcaaattataaagaagttacattggatgatcttgctgagaagttcttcctttcaaaaccatatttgtcaaaatatattaaagaaaaatcaggaatgacattcggagatattctgaaagaaatccgtatgaaaaaggcaagagcaatgcttaagagcagcagtgcaactgtagaaagtattgcagaatctgtgggatatcagaatgtagagcattttaacagaacatttaaaaaactgtataatatcacaccggtacagtatagaaacaaaccttgatcccgattcaagtttgactaaatttgaaaatgtaatcttaaaacaaatcgcctgacagttaccataaatagtagctgtcaggcgattactgttatgcagattcattattctgctaattcttcccacaattcatacaattcttctaatcttgcttcatttgcagcgcgttctgttgaaagtttctggcactcaatagagttcgaataaacttcctctttcgtcagttcctcgtcaatctctgtgttgcgatcttcaagttttgcaatttcttcctctgttttcttcaactcatttttccgtttacgttcacgtgcctgctgttccttctgttcctgccagcttaattttgaatccgaagcaggagtggatgcagcagaattgcctgaattggatacattttctgcatttgtttcatttccagaaacataagcaagtgtcagtgcttcttttttctccagataataatcgtagtttccgatgtaattaacaaatgtctgattcaccagttcaaggatccgggaggcggtctgattgataaaataacggtcatgggatacataaagtatcgttccgctgtagttatttaatgcttcttccagaatttctttggaagtaatatccagatggttggttggctcatcaaggattagaaaatttgcttccgaaagcataagtttggcaagtgatacgcggcctttttctccaccgcttaacgtatgaatttctttgaacacttcatctccggtaaactggaatgcagcgagtgtatttctgatctgtgtattggtaagatcaggatagtcatcagaaatctcatcaaaaatggtcttatcatcatgaagtacgtgatgttcctggtcgtaataaccaatcgtcactttggatccaagtgtgaattcaccctgatccgctgcgataacctgattaatgatctttaaaagtgttgtctttccggttccgttatcaccaatcacagcgacatgttcgccacgtttgatttcaaaattgatatcacggaagagaacctgactgtcaaattgctttgagagatgttccactgtaagaacatcatttccgctgatctgcgatggttccagcgtaaaatgcatttctttcgtactgtcaaccggtttgtccaatggcgtaatcctgtcaagcattttctcacgactctctgcacgtttgattgatttttcacgattgaaagactttaatttatcaataacagcctgctgatgtttgatctcacgctgctgattcatgtattctttcagctgtgcatctcggatctgctgttttttcattgcataatctttataatttccaaggtacatgcgaacctgtgcattgtcaatctcaacaacttttgtgacaacacgattcaggaaataacggtcatgggagacgataaatactgctccggaataattgatcagatatgtttccagccaggcaatggaattcagatccaagtggtttgtcggctcatcaagcaggaggatatccggacttgtaagcagtaattttccgagagaaacacgggtcttctgacctcctgaaagtgtatctgtctgtttattaaaatcgtcttccgtaaacccaagtccctttaatacacctgtaatctcactttcgcaggcataaccgtttcttgcatcaaattcagactgtagacgattgtaggtctccaggcggctctgcaattcctcaccttccagatgcttcagttcatgttcaatggaacgaatctgagcttccattgcaaaaatatccgcttttgcactttttacttcctcataaatggtatttccggattttaaatcctgacgctgcgcaagataaccgagtgtctttcctttcgcgagaataacctctccaccatcaagaggttcttctccgatgatcatcttaaggattgttgatttcccggcgccgttcacaccgacaagagcagctttctcacgatcttcaatatgaaaggagccgtctcgtacaatttcgcgttccccaaacgctttttctatattgtgacatgcgagtatcatatattttcacctcgttttttgacttctaacattatcattatatagaaaaatgtcgaaaatacaaggaaaatatatggattttaaaggtttttgcaaaacaaaagtttgacagaactttaactcttttatataataaagggtagtttaagagtggagggctaaaaattggaacaaagaaagatatcacgtgcagtcatttccagacttccgaggtactacagatatctgggagatctgctggaggctggcgtagagagaatttcatccagtgacctgagtaagaagatgcatgtaacggcttcacagatacgtcaggatttgaataatttcggtggattcggccagcaaggatacggatacaatgtgaaatatctttatacagagattggaaagatcttaggattggatagatgtcataattttattatcattggtgccggtaatttaggacaggcactagcaaactatgcttccttcgaaagaagcggatttattctgaaaagtcttttcgatgtgaatcctcgactggaaggcgtaacgatcagggggattcctgtgcgtatggttgatgaactggaagattttcttaagaataatgacattgaaattgctgcactgacacttccaaaatcaaaagcaattgaagtggctgatattctggtagataacggtgtgaaggggatctggaattttgcacatacagacctttcccttccaaaggatgtggtcgttgagaacgtacatttatctgacacactgatgaagttatcttacaacctttgtcagcaggataaagaatagaatctagcaaagctgcaaggatgctgtgggaccaactgacaaaaggaggtttcgcagcatctgttcatgttaaaaggaattaataatgttagaaaggtcaggcgataagcatgagatatcttccaaatgggaagcagatgagtgaagctgatgcacacacaattcatgaaattgggattccatcccttgtacttatggaacgtgcagcacttcagattgtcgagacaatgcataagaaaaatatttccacagaaaaaagtctgattgtttgtggaagcggcaacaatggtggagacggatttgcagtagcaaggctcttaaccgaacagggaaagcatgcagatgtactatttgcagggaaagaagcttctttaagtgaagaatgtcgatgtcagaaacagattgtagaaaatatggggatttctgtattcacagaattcccggatgaagaatatactgtaataattgatgctgtatttggtgttggactctgccgtgaaatcacaggacattatagagatgtgatcgactggatgaatcttcaggatgcagaaaaagttgctgttgatattccatccggaatctgtgctgcaacaggaaagattcttggaacagcatttcgagccgaccttacagtatgtatggcatgtgtaaaattaggctgtgagcttttccctggcaagtcctatgcaggagagagcattccggttgcgattggaattgatccgaaatatttttcgaatcgcctggatgtttgttatacctttgacaaaaatgatcttggaaaacttcttccttcgagaatgatgaattcacacaagggaagttatggaaaagttcttatgatcaccggaagtcccgggatggctggtgctgcatttctttctgcctgtgctgcctatacagttggtgccggtctagtacagatttatacagcaagtgaaaaccgtctggcactgcaggaacttcttccggaggcaatcatatcctgctatgattcttatgatgacagtcaactgtctcatcttcttgactgggctgatgtggtttgtattggctgtggacttggaatgggacagatttccgaaaagatattgaaaaatgtattgaaaaatgtatcctgtccatgtgtcatagatgccgatggacttaatttactgagcaggaatatagagttattaaatcaatgttgtgcacctgtgattttaactccacatatgaaagaaatgtcaaggctgaccggatggagtattgatacgatcatggaagatcgcttccaggcacttgatcagatcataaaacaatccggaccggatacaaaatcatccataatctgtgtgttaaaagacagtcgtactgttgtcgcacagacaaatcggcagagatttgtaaatctcgctggtaataactctatggcaaaaggtggttccggagacgttctcgccggaacgattgcaggacttcttgcacagcatatggcaccatttgaagccactactgttggagttttcctacatgcctgtggtggagatgaagcgaaaaagagcaaaggaagttacagcgtattagccagagacctgattcagggtatggccgatgcaatgaagaatgcaaaggagtgcagataaattatgaaacagtataacagagtatgtgcccggatcaatctggacgcaattgcatataatatggaacagatgaaaaatcgcattggtcaggaaggacgtttaatagctgttatcaagacggatgcatacggacacggagcagttcctcttgcggaaatgtttgaggaaacgccttatatctggggctacgctgtagcatgcatgggagaagcaagaactttaagagcacatggaatcaagaaaccaatcttgattcttggctgtgtttttcctgatgagtatgaagaaatggttgaaaaagaaatccgtgcagcagtttatacagaagagatggccaagggaatggctgaggctgccgtaaggtcaggaaagaccgcatttcttcacataaaaattgatacaggaatgggacgaattggattcaaagtaagcaaagaaagtgttgagacaatttccagaatcagcaaacttcctaatattaaaatggaaggaatgttcacacactttgcaaaggcagatgaatttgacaagtcttatacatttgcccaacatgaaaaattcctctggatgaaagaacagttagaaacaaatggcattcagatttcctattatgattgtgataacagtgccggaattattgattttccggatatgaagcatgatcttgccagagccggaatctctatttatggaatgtatccgtcagatgaagtgaaaaaagatgctgttgacctgaaaccggcactggaattaatcagccatatcagctttgtaaaggatgtggaaaaaggaacttccatcagttacggtggaactttcgtcgcgccaaagaagatgcggatcgctacgattcctgtcggatacggtgacggatatccgcgttccctttcaaataaaggctatgttcttatccatggaaaacgtgcagatattgtaggaagagtctgcatggatcagtttatggtagatgtaacagagattccggaagcaaaattcatggatccggttactctggtcggaaaagacaaggatgcaattatccgtgtagaagatctttctgatctgagtggaagattcaattacgaatttgtctgtgatctgagcaagcgtgttccgagagagtattataaaaacggtacgatcgtaaaacagattgattatttcgaataaccggaataattgaaagaatctggttgatatgcatacatccgataaaaccggagatactttagtatgttcttagaagaaaaacaaaaggttctgagaagaatcagagaacaaatacgaaaagtaactggaatatcggagtgtgaatgaattggtaattaagcggggcgacatttattacgcagatcttagtcctgtcgttggttccgaacaaggtggaatccggccggtacttataatacagaataatataggcaacagacatagtccaaccatcatctgtgccgcaattacgtcgaagatgaataaggcaaaattgccgacacatattgaaatctgtacaaatgattataatattatgaaaaattcagtcattctgctggaacagatccgtacaattgacaagaaaagactgagagaatatgtctgtcatatcgatcaggaacgaatgaaaaaaattgaccaagcaataagaatcagtctggatcttactacataaatccaaccaaattctttacagaacaaaaaaagcgtggtaaaatcataaggatagtgctttacaggacttagtgtgtatctgtaaatgcaagtgaatttatataaaatacattgatacaatagaaaaggagaatcagaatatgtcaggacattctaaatttgcgaatatcaagcataagaaagaaaagaatgatgcagcgaaaggaaagatttttacaaagatcggacgtgaacttgcaattgctgttaaggaaggtggaagtgctgatccgacaaacaacagcagacttcgtgatgttattgcaaaagcaaaagcaaacaacatgccgaatgatacaatcgagagaaatatcaaaaaagctgccggagaaggaactgctgataactatgagcgtattacatatgaaggatatggaccgaacggaaccgctattatcgttaagactcttacagataacaagaaccgtacagcttccaatgtaagaaatgcatttacaaagggaagcggaaacgtaggaacacctggatgtgtatctttcatgttcgatgaaaaaggacagatcattattgataaagaagagtgcgatatggacgctgatgatcttatgatgactgtactggatgccggagctgaggactttaacgaagaagaagacagctacgaagtattaacagcaccggaagacttcagtgatgttcgtctgaagatggaagaagccggaatccctatggtttctgccgaagttacaatgattccacagacatatgttgatcttacaaaagaagaagatattaaaaacatccagaaaacacttgatcttcttgatgaagatgatgatgttcaggacgtataccataactggaacgaataatcagttataagaaatgggggacaatgatgagtaattacaagatggaaactaaatgtgtacagtccggttacaatccgggaaacggtgaaccacgtgtgctcccgatcgtacaaagcacaacattccgttacaccagcagtgatcagatgggaagactttttgatcttgaagagtccggatatttttatacaagacttcagaatccgacgaatgatgcagtagcagcaaagatctgtgatatggaggggggagtagcagcaatgctgacttcttccggacaggcagcaaacttttatgcgattatgaacattgctgaagaaggtgatcatatcgtatgtgcatctgccttgtatggcggtacatacaatctgtttgctcacacaatccgtaaaatgggtgtgaaagcaactttcgtagacccagactgcacagaggaagaactgaatgcggcatttcaggagaatacgaaagctgtttttggagaaactatcgccaatccggcattgactgtttttgattttgagaaatttgcaaaagctgcacatgcacatcatgttccgttaatcgtagataatacatttgcaacaccgatcaactgtcgtccttttgaatggggtgcagatattgttacccattcaactacaaaatacatggatggacatgcagcctgtgttggcggtgcaatcgttgacagcggtaactttgactgggctgcttacggagacaagtttgccggacttacaacaccggatgagacttatcacggaattgtatacacagaaaagtttggcaaagctgcttatataacaaaagcaacatcacagctgatgagagatcttggatcgatccagtctcctcagaatgcatttcttctgaaccttggacttgagagccttcatttgagagtaccaagacattgtgagaacgctgtaaagatggcacagtatctccagggacacgagaaagtggcatgggtaaactgcccatcacttccgggaagcaaggattatgatcttgttcagaaatatatgccggatggaacatgcggtgttattacttttggattaaagggcggaagagaagcagcagttaagatgatggacaaactgaaactggttgcgattgtaactcatgtagcagacgcaagaagctgcgtacttcatcctgcaagtcatacacacagacagatgaatgagcaggaactgttggaagcaggtgtacagccagatctgattcgtttcagtcttggaattgagaatattgaagatctgattgccgatgtagaacaggcactggaagattaatataaataacatatgattcaggaggtatggattcccatgattttgtatccatacctcctgtttttttgtatccgaattgtaggttttaaacagtagtcagctcttttgcttaaattgtggagattgatatgcagaattggatacaatacatattttcccgtattctgtgcattctagtaatagtatttatttactttcaacaggaggcatatttatatgagcgaggaaaaaaagcaaaaatcagatgaaatcaaagaatttggtgcgttaatgttaaatgaaaataaaaagaattacaaaattcgtcttctgacaattataggtgaaattgaaggacatgaaacagtatcaaataatacaaaagcaacaaagtacgaacatttactcccacaactggctgaagctgaagaaagcgatgaagtagagggggttctcattttattaaatacactgggtggagatgtggaagccggacttgcaattgcggagatgatagcttctttgggaaaaccaaccgtttctcttgttcttggtggaagtcattctattggcggtcctcttgctgtttcggcagattattcctttattgtaccaacaggaaccatggttgttcatccggttcgttcaaacggtacttttatcggtgtgacacagagtctgagaaatatggaacgtacacaggacagaattgccagatttattgctgcacactctaaaatcacagaaaaacgtcttgttgatctgatgttgaaccctacgcagcttgtaaaagatgtaggaacactgttagaaggagaagaagctgtaagagaagggatcatcgacgaagtcggaggcattcaccaggcatttaaaaaactctatgaattgattgatgaaaaacgggaaaaaccttcggaaatgtaaatatagaacaaaaaaatggcatctgatcaaagaaattttgtaatgacatgaattttaattgatgttatacttgaaatagtatgtattcaatctatcgtttgattgaatcagtacaatggtataataattaagggggaatcagatggctgcaaaatctacaaatacgaaaaaaagttctacgaacaacacagcgaaagcagcaaaaaatgcaacaactaagaaaacatcgacagcaaaaaaagcttctgcctccacaaagaaaagttctggcagtaagacaaaaagaacttcaaatcatataaatacagcacaaagtcaggaaatccgttcagagattcttctattgggttcccttgccatctgtatccttcttatcctgagtaattttggtatgggtggcatagcgggaggagcaatttcttctgtaggatttggacttgtaggagcaatggcatatttatttccatttgtatttttcggagcagttgctttttatatttccaataaaggaaatcctcatgcttacataaaagtaggtgccgcaattgttctggtcattctcctttgtggaattttagaattgatgtttcatccatatactgccgggacatctgttttatcttactacaaagattccagtgctgataaaaatgcgggtggattacttggcggaattctgatcagtattttatgtccactgatcggagaggcaggtacttatgttattttgatcattttctcaatcatttgtatcattctggtaacagaacgttctttattagctccacttggaagacatggaaagaaagcttaccaggaagtgaaacggaaacatcaggaaactgctgagatccgcacactggagcgggatgcccgcaaagaggcacttgcgttgaagcaaagagaaaaagtcgaaactttacaggctgatgcatcttctccaagtgagaaaaagaaacgcacaaagcggacagaccttaaagcatcaggtattacgttcgccacaacgcttctttcagaggaagaatcacctgttggtggctttgggcggactccaaaatcacctgaaatgacagaacttgtcccggagaaagagccggattcaaaagatctgacggattcctttgaagatcattttgtcattaacagagcagaaccggcaatggatgtacaagaagagattccgtttgacgatgcactgcatcttgaaccggtacagacacccgcttccaaacaagaaaacgagatgagttctgaacatgatccggctacggatcctatgattgaaaatagcccggagataaaacaggagcattccaaaaaaagcagcaaaaaagacgcgcaggcagttgccgcagagacagccagtgtagaactgaccatacgggaacaggagcaaaaaccacggccggtttatcatacacctccactgaatctgttaaagaaggggaagaaaggcggcggtgattcggatgaacaccttcgtgccacggctttaaaactggaacagacactacagaattttggagttggagtacatgtaacaaacgcaagctgtggtccatctgttacaagatatgaacttcaaccggaacagggcgtaaaagtaagccggattgttggacttgcagatgatatcaagctaaatcttgcagttgcagatctgagaattgaagctccaatccctggtaaagccgcggtcggtatcgaagttccgaacagtgaaaatacagcggttatgctgggagatctgctggagtcaaaagagttcaaaaacagtaaatcgccaatttcatttgcagttggtaaagatattgccggaaaggttgttgtgactgacatcgccaagatgccgcatcttcttgttgcaggtgcaacgggatccggtaaatctgtctgcatcaacactctgatcatgagtgttatttataaggcagatcctgatgatgttaaactgatccttgtcgatccaaaagttgtggaactaagtgtgtataacggaattccacatctgatgattccggttgtcacagatatgaagaaggcggcaggtgctttgaactgggcagttgctgaaatggaaaagcgttacaaactttttgcacagtacaatgtacgtgatttaaagggctttaatgaaaaggtcaagcatggggaaaccggaccggagattcagaaaaagcttcctcagattgtaattatcattgacgagcttgctgatcttatgatggttgctccgggagaagtagaaggtgctatctgtcgtctggcacagttggccagagcagcgggacttcatttgattcttgcaacacagagaccatctgtaaatgttattaccggattgatcaaagcaaacatgccttcccgaattgctttttctgtatcatcaggtgtcgattcaaggacaattatcgacatgaatggtgccgaaaagctcctgggaaagggagacatgctcttttatccatccggatatccaaaacctgtcagggtgcagggatctttcgtttcggacgaagaagttcaaaaagttgttgattatttgattgacaagaacggaaatacctcgtacagtaatgaactagaagaacagatttcaagcagcgcagatcttccgggtcagggaatgcttccgggacagcaggacagcgagaacagcagggatgtctattttgcagatgcagggaatctgatcatcgacaaggaaaaagcatcgattggtatgcttcagaggatgttcaagattggtttcaaccgtgctgccagaattatggatcagctatgtgaagctggtgttgtaggtccggaggaaggaacaaaaccaagaaaagtgcttatgacaaaagaagaatttgcagaatatatgcagaatcagacttcgtaaaatctaaaaacaccaaaagtgatacaaaggagagggaaagatgaaaacagatattcagattgcacaggaagcagaaatgaaacacatcaaagaggtagcggtacaggccggtatttcagaagatgaacttgaattttatggaaaatataaggcaaaactttccgatgaactctggaacagaatcaaagataacgaggatggaaagcttgtacttgtaacagcaatcaatcctactccggccggagagggtaagactacaacatctgtaggtctcggacaggcatttgcaaaacttggaaaaaaagcaatgatcgcgcttcgtgagccatctctcggaccatgtttcggaatcaaaggtggagcagccggtggcggatatgcccaggtcgttcctatggaagatctgaacctgcattttacaggagattttcatgcgatcacttcagcaaacaaccttcttgcagcaatgctcgataatcatatccagcagggaaatacacttggtattgatccaagacaggttgtatggaaacgttgtgtcgatatgaatgatcgtgttctcagaaatattgttgtcggacttggacgcaaaacagacggtatggtccgtgaagatcattttgtcattacagtggcatctgagatcatggcgatcctctgtcttgcagatgatcttgctgatcttaaacgcagacttggaagaatcattgttgcttacaatttcaagggagaacctgttacagcagatgatcttcaggcaacaggtgctatggctacacttctgaaagatgcgatcaagccaaacctgatccagacacttgagcatacaccggctttagtacatggcggtccatttgcaaacattgcacatggctgcaatagtgtacgtgcaacaaagatggctctgaagttaagtgacatcactgtcacagaagccggatttggtgcagatcttggcgctgagaaattctttgatatcaaatgccgtatggcaggtctgaaaccagacgcagtagttttggttgcaacagtacgtgcattaaagtataacggtggcgttgcaaaggctgaccttgcagaagagaacctggatgcccttgcaaaaggtattgtaaatcttgagaaacatattgaaaatattcagaaatacggtgtaccggtaatcgttacactgaattcatttgtaacagatacggatgctgaaaatgcatttattgaaaaattctgtcgtgaacgcggatgcgagtttgccctctcagaagtgtgggagaaaggcggagaaggcggtttagatcttgcgcagaaggttcttgagacacttgagacaaaagaaagtaatttccatacgctttataatgatgagctttctctgaaagacaagatccgtacaatcgcacaggagatttacggcgcacatgatgttgtatatgaacctgcagctgagaaacagatcgccaagattgaatctatgggatttggttctttcccgatctgtatggcaaagaatcagtattctctttcagatgacgctacaaagcttggaagacctgaaaactttgatattcatatccgcgaggtatatgtaagtgcaggagccggttttgttgtcgcactgacgggcgctgttatgacaatgcctggacttccaaaagttcctgctgcaaacggaatcgacgttacagatgacggaaagatcaccggacttttctaaagttttttatgattggctgccggtcatagtattttttgaccggcaatgccaattgttttcatggagttagataattaattaaggagatacacatggcacagttgatagatggtaaattaatctctcagcagattaaagatgagttgaaagaagaagtcgcacagtttaaggcagaaggcattgatatttgccttgctgttattcaggtgggaagtgatccggcttcttctgtatatgtcagaaacaagaaaaaggcatgcgcctatatcggggtagaatccagatcatatgaacttccggaagagacttcggaagaagaactgattaagttagtagaagagttaaatgcggatgaaagcgtaaacggaattcttgtacagcttccggtaccggatcatattgatgaagataagatcatccgtacaatttcaccggataaggatgtggatggattccatcctgtaagtgttggaagactctggatcggagaaaaaggatttttatcctgtactccggccggaatcattcagcttttgaaaagatccaatatttcgattgaaggaaaagaatgtgtgatcattggacgaagcaatatcgtcggtaaaccaatggcagcccttttgcttcgtgaaaatggaactgtaaccgttgcacattcccgcacaaaagatcttaaagaagtagcaaaacgagcagatatcctgattgttgcaattggaaaagagcgttttatcacatctgaatatatcaaagagggagctgttgtcatcgatgtaggaatgcatcgtgatgaagcgaaccatctttgcggagatgttgattttgcggatgttgaacctcattcttctgcaatcacgccggtaccgggtggtgttggtccaatgacaattgcgatgctgatgaataattgtgttgaaacagttcgtaagtaggaggaacttgtaaatgaggtgtacacattgcggagcaaatataccagacgatcagttgatttgtcccgtatgcggtgctgaagtacagattgtaccagattataaccctctggaagatgtactcgcacgcgaagtgaaaggctcagtagccggagctacacgtcagatccaggcagatgtagtccgaagacagaatgtgagccaaaaccagcaaaacagaaatcggcaaaatcaacgatcgaatcctaattccacacgcgtcttaagccaggcggaactggataaagtaagagaagagcgaagagagcagctacggcgccagagagcgcaaagacaacgtcagaaaacagatgcaaagcgttatcaggatgcccgtcagtcaacagagaatctgcgccggacatctactgaaagcagacgcctgcagcagatcaaaaaacaagaagctgccagaaaaaaacgccaaaaattacttacggtttttttcctgctcattcttctggttggtgtcggaatttatatcggatatcagaattcctatacaggcatgatcaaaaaagggaatgccgcactgcagaatagtaactatacttctgcagagaattattttaacagagcaattataaaggataaatcaaaggcagaggcttataccggacttgctaatatctatgttgcccaggatgatctggacagtgcagagagcgtctatctcaacgcactggagacacaaccgtcgaatgtaaatctctataaagctgcagtaaaattctatgagaaaacagaacagccgaataagatttctgatctcctgcaggattgtgaagataagaatgtattatctgctatgaatgattatgtttcatctgctcctgaattcagtttgaaagaaggaacctatgatgaagtacagcaggtaacattaacatctgctacaggcggaacgatttattatacaacagatggttctgatccgacggagtcaagtacagaatacaaagaagctgttttgcttcagtccgaaggtgacacagagatccgtgcaattgctgttaataaaaagggaataccaagtgctgtttccagtgcgaaatattccattgaatttccacttgtagacgctccggcagtttctccatcaaccggacaatatagtacagccactcagatcacgattacggtaccggatggatatacggcatactacacgatggacggttcaactccaaccacatcctctgagaaatatactgacccgattgatatgccagaaaattcacaaacaactttttcagcaattctcgtgaacgataaaaatggaaaagcaacggaagtaacaacacgaaactatattactacatattaagtaaactgtgtaaagtaactagaaagcaaccttgattttggaaaatgttatgtaaattttccaaaatagggttgctttttttcgtatacagagttataataatatctgttaaaaaaataacaatactacataaaaaaggagagatttgttatgagtagattttgcttaccaagagacatttatcatggaaaaggatgtctggaagaactgaagaacctgaaaggaaagaaagccattcttgtagttggtggcggttctatgaaacgtcagggattcctggataaagcagttaattatctgaaagaaggcggaatggaagttcagctgtttgaaggagttgagccagatccatctgttgaaactgttatgaaaggtgccgaagcaatgcgtgctttcgagccggattggatcgttgctatgggtggtggatcaccaatcgatgcagcgaaagctatgtgggcattctatgagtacccggagatctcctttgaagacctgatcacaccattcagcttcccggaactgagacagaaagctaaatttgcagcaattcctacaacttcaggaacagctacagaggttacagcattctcagttatcacaaactatcagactggtgtgaaatatccactggctgacttcaacatcacaccagatgttgcaatcgttgatcctgaccttgttgcaggactcccggttaaacaggttgcatatacaggtatggatgctcttacacatgcaattgaagcatatgtatccacactgaacggacctttcacagatccacttgcactgcaggcaattgagatggttcttgattatctgccaggatcttacaaatgtgatatggttgcaagagagcagatgcattatgcacagtgccttgcaggaatggcattctctaatgcattacttggtatcgttcattcaatggctcataaaacaggtgctgcattctctacaggacatattccgcacggatgtgctaacgcaatttaccttccatacgttatcaaatacaacgcaaaagacgttgtagctgcaaaacgttatgctgaaatcgcacgcagaatgggacttgccggaacatctgagcaggctctgatcaacagccttgttgagaagattgatgagttcaatgtaagactgaacattcctaagactctgaaagacttcggaatcaatgaagaagaattcaaagaaaaagttgacaagattgcagaactggctgtaggagatgcctgtacaggatccaacccacgtgcaatcgatcctgctgctatggctaaacttcttacatgtacatactacggaacagaagttgatttctaaaatcaaaaattaataaaggtttcagtgttcttataaaataagataacgctgtaaacttgtcctaaacgatacgggtagatgcatgaaattgtgtgtctgcccgtatgttttacttgaattcatagctgaagtgtcgtattattaacaaagagcgagttgttattgtttacacaatgtttgaagataataacgtcgatttatttacaaggaggagaaacatgtataagatattaaaagctgaaaaactggctgataagatttatctgatggatgttcatgcaccacgtgtggcaagtcactgtcagcctggtcagtttgtcatcgttaaaatggacgagaaaggcgaacgtattccgctgacaatctgtgattatgacagagaagcaggaacaatcacaatcgttttccaggaagttggagcttctacagcgaaaatgggggaacttaaagctggagacagtttccgtgacttcacaggtccgctcggatgcgcttctgagtttgttcatgaagaccttgagtcccttaagaataagaagatgctgtttgtagccggtggagttggggctgctccggtttacccacaggtaaaatggttgaaagcacacggaatcgatgctgatgttatcgttggtgctaagacaaaagatatgctgatccttgaagatcagatggaagctgttgcaggcaactactacccatgtacagatgacggttcttacggacacgcaggaatggttacaactatggtagaagaacttgtaaacaacggaaataaatacgatgtctgcgttgcaatcggaccgatgatcatgatgaaattcgtctgtctcttaacaaagaaacttgagattccgacaatcgtcagcatgaacccgatcatggtagacggaacaggtatgtgtggtgcctgtcgtcttcaggttggtgacgagatcaaatttgcatgcgttgacggaccagagttcgacggacaccttgttgactttgatcaggcaatgaagagaagccagatgtacaaatctgaagaaggacgcgcgatgctgaaacttcaggaaggcgatacacatcacggcggatgcggacattgtggaggtgacgaataatggctgatatgatgaaaaaagtacctgtaagagagcaggatccaaaagtacgtgcaacaaactttgaagaagtttgtctcggttataacaaagaagaagcaatggaagaggctacaagatgccttaactgtaagaatgcaaaatgtatccagggctgtcctgtatccatcaacattccggcatttgtccagcaggtaaaagaaggaaatatcgaagaagcttacaagatcattggtaaatccagcgcacttccggctatctgtggacgtgtttgcccgcaggaatcccagtgtgaaggaaaatgtatccgtggaatcaaaggtgagcctgtttctatcggaaaactggagcgtttcgttgctgactatgcacttgagaacgatatcaaaccagaaggcgctgagactatgaacggtcacaaagtagccgttatcggttctggcccgtccggacttacatgtgccggagaccttgcaaaactcggatatgatgtaacagtattcgaagctctgcatgaactcggtggagtacttgtatatggtattcctgagttccgtcttccaaaacagaaagtcgttgcaaaagagatcgagaaagtaaaagagctcggtgttaaattcgagacaaacgttgttatcggtaaatccacaacaatcgatcagctgatggaagaagaaggattcgaggcagtattcatcggatccggtgccggacttccaatgttcatgggaattccgggagaaaatgcaaacgaagtattctccgcaaatgaatacctgacaagaagtaacctcatgaaagctttccgtgatgattacgatacaccgatcgctgccggtaagaaagtagctgttgttggtggtggtaacgtagctatggatgctgcaagaacagctcttcgtcttggcgcagaagttcatgtagtatacagaagaagtgaagcagagcttcctgcaagagctgaagaagttcatcatgcaaaagaagaaggaatcatcttcgatcttcttacaaatccgaagaagatcaacgttgacgagaacggtaatatcacaagcatgacagtgatcaagatggaacttggtgagccagatgcttccggaagaagacgtccggttgaaattgagggttctgagtacgacatcgaagttgatacagttatcatgtctcttggtacatcaccaaacccgctgatctcttctacaacaaaaggtctggagacaaaccgcagaaaatgtatcgttgcagaggaagagaatggacagacatctaaagaaggcgtattcgccggaggagatgctgttacaggagctgctacagttatccttgctatgggagctggtaaagcaggtgccaaaggtatcgatgaatatctgagaaataaataatagaaggaagattgcatataggagcataagcttctttgagaaaatcggaatttaaaaacagaatatcctgacaggatgcagaaaaatctgtgcttgtcaggatatttttaatatactaaacttgaattgagatttcatatattcaaagggatttaataactgttatattttattatcaaatatctctcaagcccttgaaaacactaagtttgtcgcaggtgagctttcccttattgtttcccttgtattatattgtcccatgagtttttacgaactctgataagggaaaaaacaagggaaagaaaatcttataaaacagtataacacaaaataaaagtgacatggtgaactgattgaaatgcttctgatttttgcaacaaatgattgattgaacgataaggagatttgatacgatgagaacgatatttgcagaatacaatccacaacgcaacagcattgatgtttatacttctgctggctatatgctccgcattgactgctgggaagcggagaagaatttaacaactactcccggatctgactgtgcattaaacgcacttgccattgatgaaccacttgagtatgcaagattgtatcttgatggaacgatgcaaatgtggatagatgcggaagattccttttaggtatacgcaagaaacggcggctctgatttctcaaaaccgccgttaggataataacttaaaataggcgcgcaaaatcacctgccccagccagcgtttttttctttccccgtagtcggggcaggttcatgcgctatgcaattattcttctttagcttctatcaagccgatattttttgctctgcgttccacatagcagcatattttccgcctttcgcaagcaattcctcgtgggttccagattcagcaatcctgccatcacccattacaagaatttgatcagcgtttttgacaatggaaagggtatgagcaatcattaccactgtctttttctcttttaatagattagcgatggcctgctttacggcaagctcattttcaatgtcaagagatgctgttgcttcatccaagagtaggatggggctatttttcagtatagcgcgggctattgaaattcgctgacgctcaccgccagagagaagatttccgttctcaccagtcggcgtatcgtatcccttttccatcttacggatgaagctgtcacagttagcctcccggcaagcatcatcgatttccgtgtccgtagcattagggcgggcgtgtcggatattatcccggatggtatcgtcaaaaagaaatacgtcctggtctaccatagaaacttgttccagtacacgctctgcggcaacatggttaatgggtttaccgccaatagaaatcgtcccgcccgttgcttcataatattttgcaatcaggttcaaaatagtagatttgccggagccagagtctccgacaatggccgtgagcttttgatctggcaccgtaaaggtggcgtgttttagtaccggttcaccgggaacatatgcaaaatctacattgtcaaatgtgatttcatgggtagctgtgtgaagcggctccatgctgccagtttcctccggctcattcattacactcaagattttgtttttcgagatcatcaggttcttataactggtaaggtctacaaaaatcgagttagccagctttgcacagaacaggggcagcatacaaatcaaaaggtagtccaccgtgctcagtgtccctgcgacccagggtgcataggccagcaagataaccagcgggcaggacagccaactcaaaataccaaagaccgcaccaataggaagcacttttgattcgtacacaaagctgatccgggaaaactcccgcatggcgttgataacagtttcgttcttcataccgcctacaccataagctcggaaagtctgaataccagaaacatactcaacaatgctgctgacgttctccgcacaaatatcgttcttttcttttccatatttccgtaccatgcggaaagaaagccataggccggggattaaaagaagatcggctatcagcaggataattcctgccggaacatagagcgtcataacaaagacaatcaacatcaatgacagggcaaaattctttgcgaaatctccgactttatgggtcaggattttttcgtagttgtttacgtcgcttgtaatggtgttgatataatcgccggtctgcccctgcgaaaatcgagacagtgggatgcgcttcaaatggttgcccataaaaagccgaatatttttgctgaccgctgcaccgccaatctgcgctttggtatagccatagctgtaaatcaggatacgaagaagaaaaaccaccgcgatcacacaggtcagaaccaggacacggttcatgtcaaattgtcccgaccacaaaaactgcatgacagagtaaagcagcataaacaggctgccggagagaagcccttccagaacagtcccgccaacgccaatataaaaattacggttctttttcaatacatcatgctcactcatgctgctcgcctccctccaactgataagtaatattccgggctgtttcgtagtcctcccacgccttccgatagtaagcattgttctttcggacttcctcatgggttccgacacaggtaattgtgtgattttcaaccactgctacacgctcgcacatcttcaacgcgctcaaacgatgggctaccacaatgacagtctttcccttacagagattttgaatggctttgtcaatctccatctgattttccgggtcagaggcgcttgtggcctcgtctaagatcaaaatgggggcattcttcaggatagcgcgggcaatggcaatccgctgtttttcaccgccggagaagcgagagccaaagctgcccaccttcgtgttatatccatccggcaaagacatgatgaaatcatcaatctgcgcctcttttgcggcggtccgtactttttccagagtggtgttactgcccatgcggatattttctaaaacgctgtcacgggtcaggaaggtcttttggaacacaatggcgacattttttaggatagtatcataattgagttcctttacatttttcccgccaatcagcacttcgccctcctgcacatcatagaaccgggagatcagctcaatcacggtacttttaccggcaccagactgtcccacaagggccatgcgttcaccatctttaattttgagattaacgccttgcagtacatcggtcttgccatcataggaaaaccgaacattccgaagttcaatatcgtgattttggggaaagtccgctccaccctcataaattggaatatccagtatctctttggtcttagtaacagcgttcagcacattggcaaaattagtccccagttcctgtagggggcgtatttccgtcagatacatggaacctacatagacgaatagcaaaaatgcgctggcagccagtgagcctttcaggaaaaacattccgccgattggaaccatcatcaacatcccacattcgatgataacaacaaaggccgcataaggtggccccatgcgccgggaagtttcattccacatggcgttttcttcctggatagcgtctgaaaacttttgaaacgatttgctccccatgttataggctttaatcaatttcatgccgctgatgtactcaatcataaccgagttcagtgtggtaatggagtgattggcccgttccatcaggtcatccgtattgcggaacatcatccccattacaacaacagcaaggatcagcggaaccagggaaatcaatgccagaggaatattgacggtcatcagataaataaagatgactaccggccccaccagatagcacacaaggtcaggaaggttatgggccagaaacagctccaacttttcaatatcttcattcagaaccgtttttatgtccccagtgcgccgttcattcaaggcccctaaaggcgctctggccatgtgttctgcaaccatgcagcgcactttgaaaagagcgccataggcccctttgtgggctgctacgccggaacagccaaacagggcaaaccgcaaagttaccgccactgcaatcattaccacggtatgtacaacaagttcctgcgtgcaggtatgattgaaggtggcgtccatcagccggtaaattccaatgtaagggacgataatgcaaagaccactgaccgccgatagaaaaattgccaggaacagccatattttttgctcaccggcccagtggagcagcaaagctactctgttttcttttttctgtttcatagatcacctctcctttccatctgaaacagagaacagctctctcaatttcgggagggcatccattgtaactggtacatcatcgggcatttcgccctcgtcaaaatgcaggacacgggagcaggtacggcagacaaattcaaaatcgtgggtgacaatgaaaataacctttcccatattggacaaccggcggatcattcccgccacctgcgtcatactgtcaaaatcaaggccgctggtcggttcatcgaataccagcagatctttcccacaaatcatgctaacagctacagctactcgttgcttttgaccgccagaaagcgtgtttggatggcgctcccgatattgggtaaggcctaattcctccaaagttgcatttaccagtgtttgatctggattgcgtataccaaaggagcactctgcctccacgctgtcagcgaaaagttcataattcacatcctgcataaccatgtaagagcgtttcagcctttccttacgctcaatcggctcgctttcccacaaaaattgtccatcgcagtctttgtgaagcccacagagagcgcgggaaaatgtagtctttccagctccgttgtggccgacaacaccaatcacttcgccctttccggcggatagctcaatgtcatgcaaaattgtttgcttcttgtaacggagcgtcacattccgcagctccaatacaggggtaggcgcaggcaagtgggctttttgcgggaataccgcctgtagatcaacagctcgcagccccatgtgttcacgatcaggttcagatagctgccaaaattcttccggggtgtatattcctttgatttctcctttttccagataaacaattcggtcagccaactccatcaggtagtacagacgatgttccgctatcaaaactgttttgccctgtttttttatcagccgcaaatgttcctttagttcctggatcgaagtcatatccagattagaggatggttcatccaatagataaatctgtgggttcatggcataaacagaagcaaaggcgattttctgcttttctccgccggacaactcaaaaatatttctgtttcgcagcttttgaatatgcaaatcttcagttgtctgctctactcgctcagctaatttctcaggagggcgagcttcattttcaattccaaaggcaatctcactgtctgtatcaacattgaaaaactgcgtccgtggattttggaaaacggagccaaccttagcggcaatctgatacatggggatattgctgatttcctgaccatctaccagcacacggccatgaagctccccctgataaaactgagggatcagtccattcaccagccttgtaatcgttgtttttccgcacccgctgcggccacagaacaggacgaattctccgtccgaaattttcaaattgatgtcgcgcagcccaccatgttcctgccccgtataggaaaacgatacattttcaaactcaatcaaccgatcacacctcctcgcacacataattcaaaaatcagataagctacggcaacggccatgacgccccaatcggaaattccgcattttatctggacaagacaggtgcgtggattgggattttcaattccacgagtgacagaagcaacagaaagatcatccgccgcttttgaagctgccatcaataaaggcacataaatacactcaaccgtcatgcccggatgtgttaaaaagcccgccagagatggtgaaacatctctcattcgcatagcgtctgtgatatagcgccagtcctcttgaatagttggaatgtaccgcagcataactgccataggaattactaactttttgggtgcgcggacacggttcatagcagacaggaactcattgacttttgtagtagtcagaacaatcccagccaaggttccgcacgcatagaccttatgaaacaagcctaaaaaggcaataaacattgtccgcagcgtgcctgtcatttctgccatgatccaaactgtcagggcacagatgaccgcataaaagcatacagccttaatgacatatttccactttccaaagaaagcccccaatatcgcaatcagcataacaaggataaattgatatgcaagtgagggcgcaaacatggacgataaaacacacataagaataagaaagagcttggcccgtgggtcgagccaaagctctttcttatggcgtttaccgctcatgctgtaatacctgctttttcaaactgctttttcagcattttgcagcctacaaaagcgctgattgcagatgtaatgataacagcaacaaacatggcaatcaggatgccggtatttgcagttgcctgcatggtgtcgatgtaactctgttcagttccgttccccagcatggtctgcgcccagccgttgggatcaacaaagaacacgatatatgaaccagtgccaccgagagagaacaggatataagacaggctgttgagttttttgcttttgtactgccctgcaccagcaacaaagtccgcgacaatcgccatgatcatgtagcccaatgcaaaagcccagtgcataccagtcacgaaccaaataatacccatgataacgcccattatagaaaggctccaacgcttatgtacttttgcaatcagcaaaagataaatggggccagcaagcagcccacctcctgctggcatgaaaaaagtaagtacaggattcgttgcaaaaaagacaccgcccaccaatacaaaaacaaataacagtgcagtaaaaatacctgttgttacaaggtctttcactgtcagacctttgttcatagaatttacttgattactcattttgacctcctacctttcattgtcttgactcgacaagtggtttgtgatattcttcggttagatacctctaatcttcgtctaatacaatacgcatttatcgaacaacattcaataggttccggcaatgttcgtctgttcctttcaaaagttcgtctaatcgttgcaaaaaggaggcggtctgttttcatgtctgaaattattgaccagttttatacaccgctactaattgaacacggttttatccgtgacccagacaaccagcaatatggggcattaggtgactgctggaaactttctcccgaagttggagaaggcacctactggacttatggacagaaagacttatatgatattaaaatccataacttttccttccacgaagatttcatgttggaatgctccatgccggaatgtctgagtatcactcggtatgactctatttccggggaggaattatctccataccgtagactgtctgccggttgtatcaaaacatttattggaggctacactccatacaaggctttgatacataaaaatattccaatccgttcggttgggattgagattgcaccggcatattatgaggactacctgaaaaaactgtacccggaggcacagatcaatcctgtggatgcatttcggaagatcgaccaaacatccgactttccagaaatgtcacggttactcactgaaatcaaagactatcgcggggaagggattgcagcaaaacttttttatgagggtaaagtcgcagaagctgtttcaatggtggtggaatatcagaagaaacatcctgataaaccagcccataagctctctcaacaggatattgaaaatctccaaatagttgccgcttatcttagcgatcactatgcttttgatattcctctggaacggctaacacagattgcctgcatgggaacaacaaagctcaaaagctgttttaagaaatactacgactgcaccatcacggaatatgttcaacagcggcgcatgagtcaagcagaatatctgctggcatatacagagctgacagtcgggcaagttgcccaaacagtaggctattccacttcaagccgatttgcagaattattccgtaaaagcactggattgttgccattggagtacagaaaaaacgcacagcgaaaataaaatgagtgccagaggaaactctggcactcgtgaaatttttcacccacattctagtcgggcttagccatgtgttgtggaatatatacggaatgcaccgtcaatattccactgctgcttgcggttgttaccaagatagtgagagctcatctgaacacaaagtttccattgccctttttcgtacctaaacgaagtaagatttcatgtgcatgctcatcactgaatttttagaataatctgtcctagcacgaaagtaaatatgaatagtttctaatagttttttaataatatcctctggcttcttgccatccttttacataccacctaattccaacatataccagttgcaccaataataagagaaatagcatattgatcggcaagactgtctttatccaatctccaaagtagattgctatttccaggcttataagtgttaccagtatggtaatcatatcccaacagtatttcttatatagccctgcaatctttatccctataaacgctacaagtattcccgcacccaccagacatccaccgcaaatcaatattcttatcagccagtatataattccggcaatgactggattggatattccattactaatctgtgccacattctttcctatcagtgcaatccagccagcaatagtctgtgtgaaagttccgattgcatcaaagaatattctgcaatcagaaataaatacctttgactgtatcatctgaaaaagagtagttgatgcggaataccatatcagcagaaacatcaatgcttcatacatgactgtttttgttttatatctgcctgccagtttttccctctgcgtatcatacttttctttggctttcagataagctgtctgattacaattctgacacttttgatagagtaccggcttttcaaccggtatctctacttttttctgatgagagagtgcatagtcccgttcctgttctgcctgccttagcttatcttgacattcctctgtcatgatttcggcagcgtgcgttttctctttctcgctctgcaacaattcttttgttttcctcaagtcgttctttaaggcttgaatgttccctgctctgttctcgctgtttaacctctcgttcaaggtcagcgattcgtcgagctgcattttcagttcccgaatagtccggtctttctggtcgagttcttcctgcatctgctctgtcagcagaagcaactcttccagttgatcgtcgctctttgagtttcttaattcgttcatcaatcaaccttcctttctctaattgctgttcaagttcagtaattcgctgttctgtttctgcaatagccggttctcgctgtttaatttctgtgccaatttctgccattgctgattttcgtctgtgagtttctgtatctggtctgtcttttcttccaaaagcatcaatagttcttctgtatccggcaagatttgaagcagctctaataattcgctctctaattgctgcaatcgttcttcctgctcctgaaaacacatcagcttctcgtccttttcctgtatctcctgaagcatctctgccatgatattctgctgttcctctatctgtgtaatcattgcttccatcatgggaattacttctttgctttcttctaatgtcattcaaacactccctccacatagacaatgcaccggataccttaccaaaggttgcaattaccttttgcagcagtgcattttgttttttaatcatctggttttcctcaaccttccatgaacctttccttatctgtccggtgagatatttttcctcaatcttccttgcatctgcaccctcatgaatcgtagggactttcaatttgccctgtctttcataagagcggtggtcaatctgattgtctatggataaatgccggttacacatcctagcccattcgcttcgccataactcacaattttttggactgttccagccggtagcatcggtcagaacccgtttccattgttttctgtttcttgccccgactttctgtactccattttcatcaagtaccggaatacggattccatgacggtctggatttttcttatcctgccaccaatccgggtgggattcatcaaccacgatattttcctcagtatctctgacaaaatcccagtccttgacttctttgttgccccatgaatgatccggattgaatggtcgcatggttacaagtaaatggacatgtgggtttccatcgttcttatcgtgtatgctccaatcggcacacattcccttgtccacgaaagttttttgaatatattcggttgtataatcaatctgttcctgtctgctccattctttcggtaaggaaaattcaaacgagcgtccaagctgtgcatctgcatttttttctatcttcaatacctcattccatagccgctgtttctgaaatgtgattttaaacttttccagtgcggcttccttatcgcctgcccttttataacggatagactgttgaaacctttttatattttcttccggtacatgcagccattcaggaggtgcattttcacacatcatcagactggtgtagacgacttcctttttggaagtgtagtagctgatcctgcctgtttcctcatttttcatcacatctccattaagatatgccgatgcggatatgacagattttcctttactgcgtccgacaatctttactgtaaagtgaaatatcgccatgatacgattccccctttctgccgtatccggcattgatttccgacagcatcttcttctagtttggcaggagtgaagctgtcggaacgccctctgcgcaagagtgccccctgcggcatgagcaggtctggctgaaagccccgccgacggaacgagcccggcaagcgtaagcgcagaccggttgccacttgtggcaaacttataaggacgacctctggttgtccataagtgcgcccttcattcaaaggcaatgaagggaatggaaaaaccactccctccgccattacacttcctccatatctgtaagtggctctttctgcatcgcctttgagaaaaactttccgtttgtttcctgcctttttaagaagcctatcaactttggtaaatcttcctcctcaatcggacagccaagaaccgattccactgcgccaccaatctgacagagcctgtgggttcgttttttactttcctctgctttctttcgcttttccagttccttccgctgtgcaatgagcttttttgtagcttcaatgctttcctgttcctttttctctaatgcacgtattctttcttcataagtctttgttgatttcgccatatcgtcttcatcctttctttttccgataaacaacagttcccggttgcatatcaggagaagcacatggtataatcctcttgcgtgtaggtatatcatggcttcggtctgatagaacctttggcggtttcttaggaagccgcctttttaagttgccacatttcttgtgacagcttttacatttcctttatccctcagatcacgcccctcgttggcttccatgaacttttccagaatgtcagttttaataaggacttttcttccgacctttaataccggaagcttcttccattcaaccagctttctcaaagtgtttctgccaattcctgtatagtcggctgcttcctcgatggataatgcaatctttctttccgtcatcttgtcacctccttataaattgcattatgcaatttttgttgtgctgttagtatagcggttttatattgcgttgtcaagcgttatgaaattttaaaaacaattattagattgcatattgcaattatgtgaggtacatgctataattcatacataccgaaaaaggaggcaatcagcatgaaagataaagaactacgcaagctgataggtagcagggcaaaacagcgtcgtctggaattaaatctgacacagccttatgttgcagagaagatgggagttaccgcttccacaatcctgcgttatgagaatggttcgattgacaataccaaaaagatggtgctggaaggtctttcggaagcacttcatgtatctattgaatggctcaagggggaaaccgatgaatacgaaaccgatattacggataagaaagaattacagattcgtgatgcaatgggcgatattctcaaacagttacctctcgcccttagtaaaaaggaagatgctttttccaaagatttactgctgttgatgttaaagcaatataacctgtttctggaatcattccagtttgcctgcaagaattacaagggcaacacgaatgaagctgatattgcaaaagtaatggggtttgaatcgaatgatgaatataacgagattatgtttctccgggagatcacccacactgttaatgcctttaacgacatggcagatatcgtaaggctttattccaagaaaccggaaatggcagaacaaaggcttgaaaatcttttatcagaagttttgtatgaggattccgattcggtatagaacgacaaccggagttatgatatacttacacgcaagaagcatttcatcagttccgattgtctgatatcgaaaggagacacacgattatggcaaaaggatctgtaagaaaaaaaggaaagaaatggtactaccgcttctatgtagaagatgcaagcggcaatctggttcagaaagaatacgctggaacagaaagtaaaagtgaaacggaaaaactgctccgtcaggcaatggacgattacgaaagcaagaaattcattgcaaagtcggaaaatattacaattggagaattacttgatatatgggcagaggaagaattaaagaccggtacgctcagtaatgggacagtccagaattacctcggtgccattaccaacatcaagaagcatccaatttcagagagaaagttgaaaaatgtaacatctgagcatttacaagccttcttcgatctgctttcctttggtggcacttatccagatggttcagaaagaaaaggttacagcaaagattacattcgttctttctcggcagtattacagcagtcattccgatttgcagtatcaccaaagcaatatatcactttcaatccgatgcagtatattaagctgaaataccagacggatgaggttgacctgttttccgatgatgacatggatggcgatatacagccaattccacgagaggattatgaaagactgattgaatttctacagaattacaatccaccggcaatacttccaatccagatagcttattatgcaggacttcgtatcggtgaagcctgtggtctggcatggcaggatgtgaatcttgaagaacagtgccttacaatcagacgcagtatccgatatgatggttcaaggcacaagaatatcatcggaccaaccaaacgaaaaaaggtaaggattgttgattttggagatacactggcagagattcttcgcaatgcccgaaaggaacaacttaaaaaccgaatgcagtacggagaactttaccataaaaactactacagagaagtaaaagacaaaaacagagtttactatgagttctatcatctggacggaacagagaatgttccagaagattataaggaaatatcctttgtctgcttaagaccggatggaagtttggaactgccaagcacgttaggaattgtttgcaggaagattgctcagaaactggatggatttgaaggatttcattttcaccagttgcgacacacctacacaagcaaccttctggcaaatggagcagcaccaaaggatgtgcaggaactgttagggcactcagatgtcagtaccaccatgaatgtctatgcacactctacaagaaaagccaagcgggaatctgcaaggttacttgataaagtggcaggcaatgactaaataaaactttcccttatttcccttacgattatctcataagggcaaaaataagggaaaatacatatcgtttcgctaatgcacaggctggaaagcctgtaaaatagggaaagttagaaatatatttcggcaaacttgaatttgtcgtgttataatttgagggagacaacggaaaagtttttgtgacgtacagcaattttgctcaaattagatgacaacctattcgaagatatggtaaaataataaatcaaatgtttgcaaatttccatagagttctattgaaaagagaaccttatggaaatttgtcatacatttcaataaacctaagaagcaaaaatctattttggaggaaacataaaacatatgacgaattataacagcaatgacaatcgatttgatggaagatgcttccttgaagatgttgagataaagttacaaaaacgactggaagaaatagggcagtctctctctgatggacagaaagagattgataacatgcaggaatattactgggaaaattatacggagatggatgagtatggttacgaagattacgataatcagcaggcactcctgcatcaggtcaacgctaataatgagaagctgcaattaaaacatagatttgagaaaatgttagatgcaccttttttcggacgtgtcgattttatgtatgatggagatgacgaaccagaaccgttttatattggaatcggaaattttgctgaaaagaacggtatgcagccgctgatctacgactggagagctccggtcagcagtttgttttatgattatgataaaggctctgcaagctatgaggctcctgccggaagactggatggagagattctttcaaaatggcagtttaagattcagaatggagaacttgtctatgcctttgagagtgatacaaagatcgatgatgatattctgaaaaaagaacttggaacaaacagtgatgtgaaattaaaaaatattgtccgcacaatccagaaagaacagaatgcaattatccgaaatacaaaagatcgaatccttgtaatccagggagctgccggaagtggaaaaacttcgattgctttacaccgaattgcatatcttttatatcatgaacgcgacactctgaaatcatccaacatactgattctttcaccgaacagcgtatttgcagattatatctcacatattcttccagaattaggagaagagaatatccgtgagatgagttttgatctctacgcctacaaagagcttcgaaaaggtgtcgcagcagactgtgaggatcgttatgatcagctggaacgtcggatgaagtttccggatgaatcagctcagaatcgttttgactggaaacaatccaaagattttattggtgaaatagaaggtttccttgcgattctggaagatcgtctgatggaattcaaagaaattgagttccgtggaatgacattgacagaagaagacttgatccaattgttctattataaattcacagagactccgttattgaaacgtatggacgctgtaaaagactattttatcgattcctgggaaactctgaaaggcagaaatatttcagaggatgatcaggagatgcttcagatgaagttcgacaagatgtacacaacgaaagatatttacaccatttataattggatgctcgatgattgtggttgtgatctgttgccggaagttccgtacgaaaaacgaaagctcccttatgaagatgtatttcctatgctctatctgaaatatcgtctttccggtgggaactcaactcataagaacattaaacatcttgtcattgatgaaatgcaggactattcgtatctgcaatataccattctggaatccttgtttcattgtaggatgactattcttggagaccgtgcacagacactggatacaaagcaacaggatgtattgagatttcttcccaaattacttggacgtgagatccgaacgattgaaatcaaaaagagttaccggaacacattggaaattgcccggtatgcggaaaaagtcagtggagtatctgatcttgagttactggaccgccatggaaaagaagtcgtagaaaagacatttaacacagatacggaattgcttgatgaacttgtctgtcatttaaaatgtccgggagactttgaaactgctgccctgatcacaacaacagaagaggaagcttttgacttaagccgtctcctgaaacttcgtggtatcaacgtatcctatgtagatcgtaacagttccgcatttaagaaaggactcacagtaacgacattttatcttgcaaaagggctggaatttgaccaggttttcgcacttcgcggtgcaaaagaaaatccgcttaaaaatcaggcggaatatatttgcgcaacaagagctcttcacgaactctatgtttacgaaattgctgacagcttatcaaaataacagttaacaagcatgcatgattaaaatttattcagaaagaacagaaaaatgaagattacattaataaccgtaggaaagataaaagaaaaatatctgcgagatgcaattgcagaatacagcaagcgattgagccgatactgcaaactggagattatagaagtagctgatgaaaagacacctgaccatgcaagtgatgtcgtggaaaatacaattcgcgataaagaagctgagcgcattatgaaatatgtaaaagaagatgcctatgtgatcactcttgagattaacggaaaacttcttagttccgaggaactttctgcaaaaatcaatcaacttggaattcaggggacaagccatatcacatttatcattggcggatccattggtttgggcaaagaagtgctcgcaagatcggactatgcattaagcttttccaagatgacctttccacaccagttgatgcgggtcattctgttagagcagatatacagaagttatcggatcatcaacggtgaaccttatcataaatagaggtctgtcacagaaaacaactggtataggacatcgtgatatattcatatactgatgacaaaggatttttatataaaaaacttcaatgaaccgagagcagatcaaagaaaagatggtatccgcaatggatctcccaaaagatgtgattcagaatgcttctgttataaccattttaggacgaaatgaattatgcattgaaaattatcggggcatcattgaatacacagatacactgatccgtgtgcagacgcgggcaggacagatccggatccagggaaaacgactccggattcaatactacacaaatgatgagatgaaagtaactggagcattatcatctttagaatttaccgaggggaggaatccggggtgattcattgcctgatccgctacttgtccggttatgtgaagattcagatcaaaggatactccccagaacgatttctgaatctctgctgttatcaccgcatccgattctggggattgacccgtatcggaacaaattatgaattatacttgagtttatctgattttcgaaagattcgtccttatgtcagaaaaacacatacaaaagtcatactaaaaaaacggtatggctttcctttttttctttatcgctaccgaaaaagaaaactattctttatcagcatcttcctatgcatttttctaatcgattgttactcgcaatttctatgggatattcattttcagggaaataaaagatggaccgacacgaccttgacaacgtttctgaaagaagaggggatttatcctggaatgcaaaagaaaaatgtagattgtcaggggattgtcaaagcccttcgaaaggaatataatgatatcgtttgggtatctgcttctcttgatggcagccggttaaaaatacagataaaagaaaatgaagatgcgcttcctatcatctcatctactcagacagataagagtaacaagacagattctttacctgctgatcttgttgcttctactgatggaatcattacaaatttaattacacgcaccggcattccccaggtacatatcggggattctgtaacgaaaggaactttacttgtatctggacggattgacatcctggatgacagtggtgaaattaccggatatcaatatacgcatgccgatgcagatattttcgctgatacacagatttcttatctggatataatttcctgttatcataataaaaaagtatatacaaaagaaacaaaaaagtccggatttattcaaatcggctctgtccggttagaaacatggaagccaaaaatgtccgctacttctgaaaaattgtgtatagcacatcagttaaaactaggagaaaatttttcacttcctgttttttatgggcatgaaacaataaaaaaatacggcttcaagaaaataaaatatacgaaaaaagagatgcagacaattttaagcagtcgatttcgctatttttgtaaagatttagaggaaaagggtattcaaattaatgaaaaaaatgttaagatatatatatctgccgaaaaggcaacggcttcaggtacgctctatctgaatcagcagattgaagaggaaacagagaccgaaagaataactttagaaaggaacgaaccggatgagtctgtcggaactgatcattgatattccggctgaatacgagataaatgtatttggccagtttgatacttatataaagaaaatagaaagaacttttcatgtcacattgatttcacgtgacggtgcaaccaagattgtaggagatacaattgctgcacagaaagcccagcgtgtacttacacagcttgtagaacttgctaaacgagggaatacgattacggaacagaatgtagactatgcaatctcgctcgtatttgaagatcaggaagaagcccttgtttctattgataaagatctgatctgtcatacacttcagggaaaacctataaagccaaaaacattaggtcagaaaaaatatgttgatgcaattcgaaatggaatgatcactttcggtctcggacctgccggaacaggaaagacctatcttgcgatggcaatggcaatcacagcattcaaacgcgaagaagtaagcagaatcatcctgacgcgcccggcaattgaagccggagagaagcttggatttcttccgggagacctgcaaagcaagattgatccgtatttaagacctttatatgacgcgctttatcagatcatgggagctgacagttttcttaagaattctgaaaaaggattgattgaggttgctcctctggcatatatgcgcgggcgtactttagataatgcgttcattatccttgatgaagcacagaatacaacgccggcccagatgaagatgttcttaacaagaattggttttggatccaaagttgtcattacaggtgattctacgcagaaagatcttccatccggaacaatatccggacttgatgttgctgtaaaggttgtaaaagatctggaagggatcaacatctgtacgctgacaagcaaagatgttgtaagacatccattagttcagaaaattgtaaaagcatatgaggactatgagaagaaatcgtccagaccgagagaaaacaggaggaaaaaaggatgagtctttttatcgaagaagaggggaatataaagttagactttgatacagaagagattgccgcattagttattgacgctgcattagaacttgcagactgtccttatgaagcagagatcaatcttcttttaacagagaatgcccagattcacgaaatgaatctggaacaacgtggaattgaccgcccaacagatgtactttctttccctatgatcgaatacgaagaaccgggagatttttccgtgattgatgaagaaagtgcagaagcctttaatccggaatccggagaattgatgcttggtgatatcgttatctcaaaggaaaaagtgttatcccaggctgaagaatatggacatttacccaaaagagagtatgctttcctgattgcacacagtatgcttcacttatttggatacgatcacatggttgatgaagaacgtgttgtcatggaagcgaaacagaaagaaatcatggaaaaagtcggtattttccgctgataggatacatatattaaatagattttaaggaatgggacactaggaggaagttatgtctgaaactgaggcacaaacaacgaaaaaacgaacgaaaaaggatgattatattgtccagggttcgatacttgcagcagcagctgtacttacaaaaatcataggcgtagtctacaggattccgctgacgaatattttaggagatgaaggaaacggattttatggatatgcctatcaggtctatgcaatcgctctgatgatttcatcattcagccttccgactgccgtatccaagctggtatcgatccgacttgcaaagcgtcagagacgaaatgcattccgtgtatttatctgttcacttgcttttgcaatcggtgttggattattcatctcgctgacaatctttttgggagcaggactgatttcaacacatttaatgaaatctccacttagcgtttacgcactgcgggttcttgccccgggacttctgatcgttgcagtcatggctgttatccgtggatatttccagggaatgggaacaatgcttccaacagctatctcacagatcattgagcaggtatttaatgccgtgatcagtattgtcggcgcaagtgtcctctttggcatcggaacaaaagcaggagaaaaatccggagaagagcttctcggacctgcttacggtgctgccggaagtacacttggaacggttatcggctctttatctggattgttatttcttttgtttgtcatttttttatataaaaacataatacgcaaacagcttaaaagagaccgcacccagaatgttgaaagttattctttccttctgaaagcattacttttaacagcaatccccgttgtattcagtaccgctgtatataatattaaccagattatcgaccttacaatctttaatcatgttatggagtcacaaggctatgtagagaaagaatatatggctcttcagggtatttacactggtaaatacgacaccctgatcaatgtcccgatggcaattgcgaacgcacttggaacatctcttgtgccaagtcttacagctgttgttacagcaggtacaaagaaacaggttcacaataagattaaccagactttacgtcttacaatggtaattgctattccaagttgtatcggttattttgtacttgcttccccaattatggttctgctgtacaatgactccagtgcaacaccggcgcgtctgttgatggcaggagctatcgttgttgtactgtatggactttcctctgtaacgaattccattcttcatggattaaactacatgacaagtcccgcaaagaatgctgcagcagctcttggaattcatctggtagcatttgtactgatgatgactgtattcaagatgaacgtctatgcactggtgggtggaaatattgtatttgcacttgcaatgagtattttgaacctgctcaagattcgaaaagtcagcggcttcaaaatcgattttgtaagcacttttggaaaaccattcgctgcagcagcagtgatgggcattgtaactttcggcgtattcagactgtttgatacactgatcggcggtcgtgtaattccagtatgcatttcactgtttgtagcaatacttgtttatgcggttgttatgttgaagatcggaacactttctgaagatgatatccttgatcttccaatgggtggacggatcctgagaatttctaagaaattccatctgcttccagccgtaaaagtagaagaataaaaaaaataaaaaagccaatactgtatgaaaaaaggagcgatttgcgatgaaaaaatacatgattggctttttttctgttttatttctgattaccggatgtttgattgcaggttatcaggttagttacaacaatctactgaaaaaggaaaaagctatagaactggctaaaaatgaaaaaaatgattccattcaaaccagacgcagttcagccaaaggagagtctgtttcagatgatgcctattatctgaaagagctgcatggatatgttgcggtctatctgcaagatgggacaaccctttacgaaacaaccagcctatccgtaaataatctgccggatgaagtacaacagaatctgaaaaatggaatctatcttaagtctgccgaagaactgtatggttttcttgagaattattccagttaaaaagtggacgaagtgcacagaatcgtgtataatacagagtcagcggaaagaatatcggttactgttcacacgggagtgaacagtaaagaatatcgcaacattaaacggaacaagaaaaaggagagagatagacaatggaacaaaagaagattgatcgtatcaatgaattatataaaaaatcaaaagcggaaggactcactccggaagaagcgaaagaacagaagattcttcgtaaagaatatatggaacttatccgagtgaacttaagaagccagctgaacaatattgacatggaacaaaaagatggaagtattgttaatcttggtgagaagtatggcgaaaaatatatgaacaagaaaggaaactaggatcatgctacagaatttaccacaggatcctgttatccttttgagtgttgtgaatacaaagcttagagatttttatccgtcactagatcaattatgcagtgagatggaagtaaataaaaaagaacttatagataaactagatctgattgactatgcttatgatgcatcctgcaatcaatttgtataaaggaaatgagaatgaaagaaataattgaaaatgtaaagctggtggagaatgctccgttggaagagcctgcacgccagtattattttatggaaaaagcaaaagaatatgttgctgaaatgtctgagaaactggggcgtccattagtcgcggtaattcaaacatttggttgtcagatgaacgcccgcgactctgaaaaactgcttggaattttggaaaaagtcggttatgtagaaggaacagatgaagaaacagcagactttgtcatctacaacacctgcactgttcgtgagaatgcaaatcttcgtgtttatggtcgtctcggacagcttggcgcaatgaagaaaaagtatcctcataagatgatcgcactgtgtggctgtatgatgcaggaaccggaagttatcgaaaagttaaaaaagagctaccgctttgtcgatcttattttcggcacacataatatttataaatttgctgagcttttaacatctgcaatgcagtctgacagaaccgtcattgatatctggaaagatacagacaagattgtagaagatcttccggttgaaagaaaatatcctttcaagtctggtgtaaatatcatgttcggatgcaacaacttctgtagttactgtatcgtaccttacgtacgcggacgtgaaagaagccgtgatccaaaggcaatcatccgcgagattgaacgccttgttgcagatggtgttgtagaagtcatgctgcttggacagaatgtcaattcttatggaaagaaccttgaagaaccgatgacatttgcacagcttcttcaggagattgaaaaaattgaaggacttgaaagaatccgtttcatgacttcacatccgaaggatctgtcagatgaattgattgaagtgatgagtaaatcaaaaaaaatctgtaaacatctgcatcttccggttcagtccggaagcagtcggatcctgaaactcatgaaccgtcattatgacaaagaacagtatcttgcacttgctgaaaagatccgcaaagcagttccggatatatcacttactacagatattattgtcggtttccctggtgagacagaagaggacttccaggaaactcttgatgttgtaagaaaagtgcgctatgacagtgcgtttacttttatttattcaaaacgtaccggaacacctgctgcagtaatggaagatcagattccggaagacgttgtaaaagatcgtttcaatcgtcttttacatgaggttcagaccatttcagcagaacagtgtgcaattcatgaaggaaccgtgcagacagttctcgtagagtgtgtcaacgaacatgataagcatctgatgacaggtcgcatgagcaataatctgctcgttcatttcccaggggatgaaagtctgatcggtcagctggttgacgttcaccttgacgaatgtaaaggattttactatatgggaacgatagctggtaactagaaatcaagattgtcgtaagtgaactttctttttgattttatgaatcagatacctgttttttctgcatcttgaatcaaacccgttcaagaaattcagtgttaaactaagacatatttttaaaatatttcatgagatttattttcgaagatgaattctagatccatgagtattctgaaaacaggaaggagataaaaatatgactagaacactgacaggaaaaccgagtattgatcgcccatggatgcagtattatccaccacagttgatggaaggactttctattccagaagatacggtttatgaatatttactgaaacgttgcccgggagatgatgtcgcagcaattcattactatggcagagaaataacctggaaagaagtaaaagagcaggtggataaagtagcacgttcccttcgagcaatcggttttggtgaaggtgacgaaatcccaatgtttttacgcgctgtacctgaattcatctacgtacttcttgcagcagaaaaaatcggagcttcccttctttgcagagataatacgattcaggaaaatgttgatgcagtaaaaaaatccggtgcaaaaatgattatcgcacaggatttcttatctcatgaagacctgaacaaatatcgtaatgaagcaggtgtacgcggagctgttctcttaagtcctatacaaagtgccaatcgatcagaagtcccggattattgctggaattatcttgaatcactttatacagattatcctgcatatggtccgtgtacaatatcctgggatgaatttctcaaattaggagaagcttatcaaggtactgtagaggcagaaaaaaacattgaccgtccacttttccgtgcttatacaagtggatctaccggtccatcaaaacaggtaatccattctgcccacacaatgatcggaaatatgcatcagatgaacttttatggtgcatccagtgattttcgtccaacctggctcgtgacacagctcacaccgtctcttgtggcagtcgttgttgctatgttgcttctgcctttagcttcagataaattgctgattttgagcccgtttgtagcaccggaagatgtcgatcttgaaatgatgcgctatcgtccgaactgctggccactgattcctatgtttattgaaacagttatgaaaaatggcagagttccggatgattatgatatgtctcacctgttttccgccggagccggatgtgaagcatataacaacaatcagctgcagcgtgcacaaaaattcttgaacgaccataattgtaaagcaacatttacaaccggatatggatgtagtgaagccggttcaaatatgtcactcccgttaacacctcatccaattagaaatggaaatgtcggaattccaatgccgttaactacaatttcgatttttaagccaggcacagaagaagagcttacatataacacaatgggagaaatctgtcaatgtggacctggaaccatgcttggatacgatgacccagaagcaaccgcaaaagctatcatgatacattctgacggaacaagatggctgcataccggagatattggatatatgcaggaagacggaacaatttatgcattaaccagaggagacgcacctcgctatggcggtggttctcttgcaacacttccgatggaaaaccttcttgcagacgcagaaatcccgggaattgacgatgaattttttgtaatcattcctgatccggaacatcatcgttgctttgtgccatatctttttgttgttcttgataagggatacacggtggatgatattcgtgaaaaagtatacgattgtctggaagaatatatgcatccgattgatattattgcacttccggaacgtcctttcttccattttaaaacaaacagaatcggattatctaaagatattatgatggggaaatttgaaaattaaattttaatgatttttatgtaagcattaaggtgttgtccgctgatacggcaacaccttcttctttttttaatcattttgtgatgtggagaaacttatgtttcaggtcctacaaatgatggaaatggaagcttagattacaatggaagtgcccagatcaccggcggcatatttgcagcatccggttcctcgggtatggcacaaaattttgattcttcttcaacgcagggcactattatggtaaatattgatgaacaggagggtaatactgagatttcactccttgacagtagtagtactgaacttcttagttggacagcagcaaagcaatattcttccattatcataagcaccccggaaatctaacagggagagacttatactataacagccggaacagcagagcagagcgttaccatggatagtctggtttatggaagtaacgctcagggagaaatgcctggcaatggtggagaaagaggtgacatgaaaggcggaccagggaacagacagcctgacgcagacatggagaaacctcaggggagcactcctccagatgccccatctggtaataagtaagaaaaaatgtatgagtatgaaactaaaaatcatacacatgcattttttcgtttatttatcatataacaagtgaaaagcaaacttgttcatgttataattgattcaaagaaaaatagtaaaaatactttgccaaacttgatataatagcgaacaatgaggcagtacactagcaggagggcagaaaaatgtttaaaacaaaatgtaaaaaaacagtttcaaaaatgatcctatcattcatactgattacggtaactctattgtccggctgtcaaaagaatagcacccattctgctattgagtttggaactatagatgtgtctgaaattgataaaatcgaactttctggcacaacaggtgggaaagatggaaatttttcctatacattgtctgatcaggaaaagaaggagttcgtccatttgctgaatcaagttgagcttggtgatgaagttgataaaaatcaagcattattaagtggagcagttacttactataagctttatttccaaggaaaagacgtcgttacactctgtccgggacattatttcggtgttgatgaaaagtattatgagtttgttaatttcgataaattgtgggatgaatttgtcactttcaatagtaaacaagatacctctgagaaattacaggaaaaagaacaagtatattttgatgcaactgttcttgaagtaaagaaaaaatcaattaaggtaaaatgttcagaatcctttgatagtggtattcctgttgatgaagaattctctgtaacaatgaatagagtagaaagtggtgagctccctgatttgaatgccggtgaccatattcgtattgtatttgatggcatcatcaaggaaagttatcctctgcaacttggaaatgtctttgctatatatcttctagatgaaaacggaaacttgtaaagtccgtagtctgaaaggctcctacaggagtctttcgtttttttatgtcccaaaccaatatattttatggccataatatgaatgcgtgttcgaagtatgttatactgatactgattatgtgaggcgaggtgaattcaacttatgataaaaattgcaatcgttgacgatgaagaacagacaagagaacaaattctccggactctaaaggaaaatatacaggaacaacacgaagtagagattaaactatatgcatcaggtgaaagtttctttgaggaaattcagaaaggtgaagcagcggatattttatttacagacattcagatgcaacagctggatggagtggaactggggaaattggtccgaaggatttgccctgacatgtacattgtcttcatcacatcttatgaagaatatgcggcagaaagttatcggatcgaagcatatcagtatattttgaaacaggatctagaatttcgtcttcccggagttgctgaacagcttattgaaaagctgcaaaaacaaaagaaagaattctgtattataaaagacggtacagaacaggtgaaattgctttataaggatattctttatctgtataaatccaaaggtgctaagtatgtaaattatgttactacccaaggcgttgtgagagagcgaacttctttggaaaatgcactgaaaatgttaaatagtagacaatttcttctggtggaacgtggatacgctgttaatataaagcagatttgcagagtaagcggtgacactatctatctcgaaaaaggatatgaagtaccggtaagtaaggcaagacttgcagaagtaaagcgagaaatcaatctctactggaggaattcgtaacgatgaatacacttggaatatgtattggactgaattttcttgaaaccttccttttctattatctgttattcggaacagttatagacagaaagactctgaaaacgaaagataaatggattctctattttgttttaatcgtcacttcaacaattatttctgtatgggtcaaaagatctgtgtttagtgcttatggatacctgttgacgattttaattttggttttgggaagtttccttgcctatcgaaagcaactgattcttcttacagggatcgcatctatgtatgaagcagcaatgatgttatttttatatatcatttactaccttctcgcatttatttacgggaatcaggctgaaaaccctcagattttatttttccgttaccatgaaaatgaagtattttgtgtgatacaaagcctgttattaattatttccttttttatcattttcaaaataagaagctggaagaagaaaaaagacatagaagcctttcaatgggtatttgttttatgtggtgtactgttatcagcactcgttttggagtatcagaaacttttaaagtatggactactgtactccacagccggaattccggtgattcaggatgtcttaaaaggaagtctcatcagttttcttactatgatcgtgcttgtcatcgtcatgacatttcttatatggaaaaacagaaacataacgggacaaaatacatttcttctgatgaaagaagagatggagaagcaaaagtatgaggaaataagagcttccatcgagcagaacaaagaactcgttcatgatacaaagaatcattatcttgtgatcagtgaatatgtgaaaaatcaggaatatgaaaaactggaaaattatgtagatgaaatcagaagaaattttgtaaaaatcaatccacagatttatacaggaaatcatgtagtagatctgattcttgggcaaaagcgaatcctggcagtacaaaaagggattgatttccaattggatgtaacaccactatccagtctgacgatggaagaaagagagatctgttcactatttgggaatctgttagacaatgccctggaagcctgtgagaaagtgactgataaagaacgtaagaaaatcagtataaagattgagcagcatatgcagatgttgtttcttgaaattaagaatggaaccgataagcttcctgccaaatcaggacatacttttctgacttcgaagcaggataaatctcttcatggatatggcttgaaaagtgtggaacggattgtcacacgatatgatggagatctggcctatgaaatggaagatggaatgtttgttgtttcaataacattttttgatttatgcgagcaacgagccaaagtccgtgcttgcacgagaccttggcgactgccgcgataacttgagaaactcgcagagcgtgtttctcatagtttataaatactcatgtccagtaatccagtacttgaaggccatccgcttgcagtactttcaccacaagattaaactgaatgtaagaaaaaaacctgttccaaattttcaggatacaaaattcgtatcacacaaacaggaatggaaatggaggaatgatgccatgacaattaagaaaaagagaactaaaatcattttaccatcgattctgacagtcagtcttacttgtggtctgttacttgcgggatgtcagaagacacctgaccagagtgcagttgtcagtaaggccggaggattaagcgaggatgtaattgcagaccctttgaaagatggagagacacagacactgaatctgccggaacactgggacacaacagtaacatggagtaatgaccgcggagtttttcacgcagatcagaaattagaatctgttacgacaggaaatcttccggtgattgaagtcagtcagaaaaaactggagcttgaacaattaaacggacttatttcctattttgcaggcggagagattttgtatcagacgcaggaacttaccagagaatactatcagaacctcttagataggattaagaacagggaaggattctatgctgacaacagtgtggagtatgatttaacagggcttgaaaagttagtggaagaagttcttcctcttgcgccagagcagacaccattgcaggaaattggacagattgaatacacatcaaaaaagacagatccggcgtatgaagcaaaaagaaaatcactggaagcttacggaaatgatattcttccggataccacaaagcaggatggaatggagattcattttcaggcaacggttggtgcagatgcaaagggtacgatcaatgcagaaacttacgatccggaagcaggaaattatagtatcttctcctggtcagaaggaaatgggatcgaactggcaactattgaaaacactctcgcaagagagaatctcacagcccaatatggagttcctgcaggaaacgtaaaagaatcttttatggaaaaactacaagcactgaaggaccagatggaagaaacctctctcttagaagagacagcagaagatgaagctgaaaaagttctgaaagatctgaacctcgaaaatatgcagttgttgtcatcagacaaaatcctctggtatgcacagtctgattatccggaagccactatattagaaccacaggaagcattatggaatgctgatccaaatcttggaaaaacaggttatcgtcttacttacgttccttctgtttccggattaaaaataaatcaggataaatccggaggatattcagatgatagtggatttgcatatgcaccttccatgccggtagagcagatttatattgtagtgacagaagatggaatccgttccttcaaatggaagggtatgagtcaggaagaaaagatagttacagaaaatgtaaaactccttgcatttgatgaaatagaaaaccgcctgatcgatcaggtgaaatatctttacccttccagtcagcctgctgaggacaagacgatatttggttatgatgttgcaactgtcgaactaggatatacttatataccggcatataagaatccacaaaatgcctggctggttccggcatggtttttcactataagcgagagtgaagatacaactgccgaacttggaacagccggaaaaaaaatagaaggatatcagaccgactacattgtattgaatgcaacagacggtggaagaataggttcttattggagatgatagaatatgaaacgaagacatcttttcagaacagaattgaaatatgactttggaaaccgaagattttatatctctgtactggcgttgtgtgcggttcttttgattgttgcacttccttatcgaaatcatctgatcgctttcggtggatcaacagaaggggaagcatggttatgcaccttcacctatgcaatcacttcagaaaaagccttgcttttctttccactgttggttcctctggcaacagccgcagatatacaggaagaattacacagccgctatgcatggtttcttattaacagaataggaaaaagaaattatatttggatgaaaagttttggagttgcattcacaggtggtgccatttccgtttcagcggcaggaattgcattggttgtttttatagttatctgtagaaatatcccgactctgaatactttgcaaaatatatcagaggtaataagtatcacaggaattggatttatcagactttttctaaatggagcattgtggtctttatgcggttcactgacagcagttttgactaagaataagtatctcagctgtgctgttccatttattttatattatgtactcacagtgtttcaagaacgctattaccgcaattattttttcctcagtccaaagcagtgggcaagcccggaatattatggaaacggattctgccttctggctctgcttctgatcagcagtcttctggtactggctttgcgtaaatgcgtggtaaggagagtggttgcatgaaaaaatcgcaatttaaaatggacattcatcaaatctttcttctaacaaaaaggaatttctctgactggggcaaaaatccgagaatctggatgacatttgcattaggatttgtactttgtctgatgttgacaaatcagattttagagcaggcacagacattccagacaccggtgcagatgttcgagccactgatctggaccttcggtgacgcacagtccgtgatgctttcatcccttttactgctgttattatttgcagatatgccttttgtaaatcagatgacaccctattggctgatccggacaaagcgaagcgtatggatggcaagtcagatcctatatgtgatcctggctacttgcctttataccgtcttcctctgcctgacagaacttctaattgcaagtccctgggcttacgttggaaatgtatggagtcagaccgctgcaagcattggatatggaagtaataatcatcttacggttcctgtatcaataaagacaatggaaatgacaacaccatataaatgtgcaatctgtgttgtatttcttatgcttttctattcgttatttattacttccgtcatgcttgtattaaatctacagaagggaagagccggaggcgttgttggcgcactcctgataaatctttatggaattcttctgactccggatatttttcaaaaagtttttcatctgggtggagggctttcctatcgggcaaatattctttgcggatggttatcacccttaaatcacgcaacatttccaatgcataatttcggatatgattatttgccacaaataaaaataagcatcctgttattccttgcagtgatatgtattttgcttttcatctcgagaaaatgtatcaaacgatataattttacattttctcaggttgatgaatcctgacggaataagaaaggggaaaattatgaaagctgctgtgaaagttaaaaatctaacaaaatcttttggcaaagaaaaagtattaaaaggaatcagtcatacctttgaggcaggaaaaatccacggaattatgggatttaatggctccggtaaaacagtaatgttcaaatgcatctgcggttttcttcaacctgacagagggagcgtatatgtctatggaaaaagaattggaaaagatattgattttccggaaaataccgggatgattattgagagtccgggatttcttccatatatcagtggatatgaaaacttaaaacgacttgcacaacttaatagaaaaataggagatactgagatccgggatgcaatcgcaagagttggtcttgatccgttttctaaaaagaaagtaggtcaatattcactcgggatgagagaacgccttggaattgcacaggcgatcatggagcggccaaaactattaattttagacgaaccattcaatggattggataaaagaggcgcacaggatgtctgcgaactctttgttgaattgaaagaaaaagggacaactattctactagctgcacacaatgtgatggaaatggaatggttgtgtgatacggtatgcgagatggatgccggacagttagaagttgtttatgaaaaatgaaataataattttttcaaattaaaagaagagagcgaacccaagaatattaaacgaatattcttcagttcgctctcttcgcacattgcgatataggtactccgacaaaatgatacatttctacgttctcaacatcttcaacatcagcttgaaattcatgttaaaatttgttagaatgatttgcgaacttacattctaaagagtttttagaaaacccttgaaaactaaggagaaattgatggaaaatattgacatagataagttaacgcccatgatgaaaatttattgcgagacgaaagagcagtacaaggattgtatcttattctatcgcctcggcgatttctacgaaatgttctttgacgatgccttgactgcatcccgagagcttgagatcacactgaccgggaaaagctgtggtctggatgaacgtgccccgatgtgcggaatcccataccatgccgtagaaggttacttgaaccgtcttgttgcgaagggatacaaagtcgcaatctgtgaacaggtagaagacccaaagactgcaaaggggatcgtaaaacgtgaggttgtaagaattgttacacccggaacgaatctggatacacaggcattagatgaaacgaagaataattacatcatgtgtatcgtctatattgcagaccgctatggagttgcaatcgcagatatttctaccggagattattttgtcacagaacttccggacagcagccgtctgatggatgagatttataaattcagtccgtctgagatcatctgcaacgaagcgttctatatgagcggtatggatctggatgcgatgagagacaagcttggaatcacgatttattctctcgattcctggtattttgatgatgctgtctgcaaagataagctgcttgagcatttcaaagtaaagaattttgcagggcttggacttgctgattatgactgtggaatcatcagtgccggagcacttctgatctatttatttgagacacagaaaaattcactttccaacctgacacatattacaccatatatcacaggaaaatatatgctgattgacagttctacacgtcgaaatctggagctgtgcgaaactttacgtgagaagcagaagcgtggttcccttctctgggttcttgacaaaacacgtactgcaatgggcgcacgtacgcttcgcaaaaatgtagaacagcctttgatcgataaatccgagatcaaccgcagactggatgcagtagaagaactgaaaaatcaggccattgcccgtgaagagatccgggaatatttatctccggtctacgatctggagcgtctgatcacgaagatcacttacggttctgcgaatccgcgagacctcaccgcattcaaaggttctctggagatgctgccaccgatccgctatattttacaggatctgcaggcaccgcttttaaaagagatttatgaagatctggatgcattagaagatctctgcgagctcgtcacaaaagccattcgtgaggatccgccgcttgccatgaaagagggaaatattatccgcgacggttataacgaagaagttgataagcttcgccgggcaaaatcggacggaaaagactggcttgcaaaacttgagaatgatgaacgagaaaaaacaggcattaaaaacctgaaaataaaatacaacaaagtcttcggctattatctggaagtgacgaattcttacaaggatcttgtaccggattattatacaagaaaacagacacttgcgaatgctgagcgttatatcacaccggagcttaaagaacttgaagatatgatccttggtgcggaagataaactgtatgcactggaatatgagctttacagcgaagttcgtgaaacgattgccggacaggtggagagaatccagcaaactgccaaagcagttgccgcactggatgctttcagttctcttgcacttgttgcagagcgcaacaactatgtccgtccgaaaatcaatgaaaaaggaatccttgatatcaaagaaggccgtcacccggtcgttgaacgaatgattccaaatgatatgtttattgccaatgatacttacctggatgataagaagcacagaatttcaatcatcacaggtccgaacatggcaggtaaatctacttacatgcgtcagactgcattgatcgcactgatggctcagatcggatcttttgtcccggcagaaagcgcgaacatctgtctttccgaccgtattttcaccagagtcggagcatccgatgaccttgcttccggacagagtacattcatggttgagatgaccgaagttgccaatattttaagaaatgcaacctcaaaaagtcttctcattcttgatgaaatcggacgcggaacaagtacatttgacggtctgtcaattgcctgggctgttgtagaatacatcagcgacagcaaactgttgggagcaaaaactttatttgctacacattatcatgaactgacagaactcgaaggaaagattgataatgtcaacaactattgtattgctgtaaaagaaaagggcgatgacatcgtattcttaagaaagatcgtaaaaggtggtgctgacaagagttatggtatccaggttgcaaaacttgccggcgttccggatcttgtcatttcccgtgcgaaggaaatcgtagaggaactcagcgatgaggatatcacaaaccgcgtcagtgagatcgcggccaaggaacatactgcaaagaaaaaaagtaaggcaaaaaaatatgacgaagtcgatatggcacagatgtctctgtttgacactgtaaaagatgatgacgtacttgatgaattgaaaaatatcgatgtcggtaatctaacaccgatcgatgctttaaatacaatctaccggttacagaataagctgaagaaccgttggtaaaaggaaaggcggaaatatgccacacattcatgtattagaccagatcacaattgataaaattgccgcaggtgaagtaattgagcgtccagcgtcaattgtaaaagaactcgttgaaaatgcgatcgacgcaggatctacttctgtaaaaatagagatcaaggacgggggcatttccttcatccgtattacagataatggctgtggcattccgcaggatgaagtgcagcgtgctttcctgcggcattctacaagcaagattgagacagtggaagacctgtctcacatcgcgtctttgggatttcgtggagaggctctttcaagtattgcagctgttacccggacggaactgatcacaaagacagccgatgcagagtttggtacccgttatgtcattgaaggtggaaaagaagtatccttggaagatatcggtgcgccgaacggaacaacctttctcgttcatcagttattttacaatgttcctgcgagaagaaaatttttgaaaacaccaatgacagaagccggacatgtgcaggatctcttgatgcaccttgccctgtctcatccggaagttgcttttcagtttttgaataacggacaggaaaaacttcgtacttccggaaacggaaaactgaaagatgtgatctacaatgtctatggccgtgatgtggcagctaacctgattgagatcgattatgagaaaaatggtatccatatcacaggttttctcggcaagccgatcatcacacgtggaaatcgtaactttgaaaatttcttcgtaaacggccgttatgtcaaaagtgcaatgatctccaaatccgtggaagacgcttatcgtgattttgtgatgcagcacaagtttccatttgcagttctgcattttcatctgagtggagaaaatgtagatatcaatgtgcatccgacaaagatggagcttcgcttctcacggcagcaggaggtttataataccgtctttgaagccgtacacaggactttgctggaaccggaactgatccagaaagcagaagttcctgatccggtggaatcgaacgaaaacaaggcagaaagaccggagcgagtgaaaaagacattcacatccgcttcgaccaaagataaagaggataccggcagtccgtttcttcttcgtccgcgtaaggagaatgaaaaagtaacagctgcggaattgatcaaagaatccagggaaacggttaaggatgatattcaagatgaggattattttatccgtaagatgaaggagcgcgtactttcttaccataatcgttcttcttccgccgaagttgcagaccggaaagagattttccgtgcagatgaacagaaagacaaaattgctgaacatgtcaaatacgccgttgaagcagcagataagacagttgcaccggaaactgcggcaacagttcagaaacccgaaccagttgctgaaacacagactgttgccacaagtgcaaacacaacaccggattgtgaagcaactaatgcaaaaccagatccagaaacaggcactcagatggatctctttgaagaaaatttcttaaaaagagatatccgtgcagaatataaactgattggtcaggtctttgacacctactggctcgtagaattcaaagataatctctacatcattgatcagcatgcggctcatgaacgcgtcttgtatgagcgtaccttgcgtgaaatgaaaagcagagaatttacttctcagtacttaagtcctccgatcattttaagcttatccatgcaggaagcacagcttctgaatgaaaatatggaccgcttttcacgcattgggtttgagattgagccatttggtggggaagaatatgcagtccgtgcagtacctgacaatttgttcagtattgccaagaaagaacttctgatggagatgatcgatgatctgaccgaaggtctttctacttctatgacaccggagctgatcgatgagaaggttgcatccttgtcctgtaaagctgctgtaaagggaaataaccgtctttctgcacaggaagtagacaaactgatcggcgaactcctgacactggacaatccatatcactgtccgcatggacgaccgacaatcattgccatgacaaaacgtgatctggaaaagaaatttaaacgaattgtataaaaggaatcgaggaaatatagatggaacagacaaacaaacgcccgcttgtcattctgaccggaccaactgctgtcgggaagactgctgcctccatcggacttgccaaagcgatcggcggagagatcatttctgctgactctatgcaggtctacaaggagatggacatcggctctgccaagatccgtccggaagagatggacggtgtgccgcatcatctggtagatgttcttgatccgtctgaggattttaacgttgttctctttcagcagatggcaaaagaagcaatggaaggaatctatcagcggggacacattccaatcgttgtcggcggaacaggattctatattcaggcattactttacgacattgatttcacagaaaataatgccgatactgcttatcgggaagaattagaagcacttgccaaaacccagggtgcagaatatcttcatgaaatgcttgaaaaagtagacccggaatctgcggaacagattcattttcataatgtaaaacgtgtgatccgcgcgctggaatattatcagcagaccggacagaagatttccgagcacaatgaggcggaacgtgagaaagaatctgcttataactccgcatattttgtgctgacagatgatcgtaagattctctatgaccggattgataaacgtgttgatctgatgatggaagaaggacttcttgaagaagtcaatgcgttaagattgcgcggacttaaaagagaaagtgttgcgatgcagggacttggatacaaagaactgtttggttattttgaaggagagtatcctttggaagaagccgtacgcattattaagagagacacaagacattttgccaagcggcagttgacctggtttagaagagaacgagatgtcatctggcttgataaaagtgagattggaagagaagatgaacaactgatccaacagatgctcactgttttaaaggaaaaagaaatcattcattaggacatcaggctgcatttagataaaatgcagctttgccatgtaaatcaaacgataaaaaacttaaaaagaaagaagaagaaaaatgaatacaccaactacagaaacaatttacgaacagctaggaatcagcaaagaagtctgggcattcggacagaagacagaagagaaactaaaagaacgttttgaagaatttgacagaaacgctgaatacaatcagttaaaagtaattcatgccatgcaggaaaaccgcgtaagtgaaggatgctttaactatgtaagcggatatggatacaatgatcagggaagagatactttagaagatgtctatgcctctgtttttcatacagaagctgcactcgtacgtccgcagatcacttgcggaacacatgcgcttgcgcttgcacttgcagcgaatcttcgtcctggagacacactgttatctccggttggaaaaccatatgatacacttgaagaagtaatcggaatacgcccatctaacggctctcttgcagaatatggaatctcctataaacaggtagaacttctggaagatggatattttgattatcctgcgattgaaaaagctctggaagataaaacaatcaaactggcaacgatccagcgttccaaaggataccagacacgcccaagctactctgtagaaaaaatcggcgaactgattgcatttatcaaagagcgtcgcccggatgtcatctgtatggtagataactgttacggtgaattcgttgagcgtatcgagccaagtgatgtcggtgcagacatgatcgtcggttctctgatcaaaaatccgggtggcggacttgccccaatcggcggatatattgccggaagagctgatctgatcgaaaactgtgcttatcgtctgacttctccgggactcggtaaagaagtcggtgctacacttggtgttacacagtccttctatcagggattcttccttgcaccaactgttgtatgcggtgctttaaagggtgctacttttgcagcaaatatctacgaagctttaggatatccggtaattccgaacggttctgaatcccgtcatgatatcatccaggcggttacacttggatcagcagaaggtgttattgcattctgtaagggaattcaggcagctgctccggtagacagttatgtaagcccggaaccatgggcaatgccgggatatgacagcgatgtgatcatggcagctggtgctttcgttcagggttcttccattgaattaagtgcagatggaccagtaaaacctccgtacgctgtctatttccagggtggactcacatggtatcatgcaaagcttggtattctcaaatcactgcagagcgttattgatgcaggcgttctttctatcgagcgtgtgagagaacttctgtaaaacaatttttcgagagaattctatcgaaaattcagttgagttgaatcaattgttatgttaaaattcagacagatgtaatctgctaagaaagtaagaggatatgaattttaatgaacacaattgcaattataggtggcggtgcatcaggaatgatggccgccattttcgctgccagaaagggagcgaaagttctccttctggagcaaaacgatagattgggtaagaaaatattagtgactggaaatggccggtgtaattatacgaatacttatcaggacgcttcctgttatcgttcggagcagcctgactttatcacgcgggtactggatcagtttccggtggaaaaagtcattgcttttttccgagaacttggaatctatccaaaagacagaaatggatatctgtatccattttccgatcaggcaagtgccatccgtgatgttttggaacaagaagtttaccgtcttggaattgatgtgcgtacagagacttcctgcaccggaatacagaaaacaaaagagcgatttttcctacagacctcacagggtttattgaccgtagatcaggtgattctctgcaatggatcaaaagccgcaccttccaccggttctgacggttccggatacgctttagccaaacagcttggacatcagataattcctgtacttcccgctctttgtgctttacattgtaccggaaagcatttccgcgcaattgccggagtacgtgcacagggaaaagtttcgttgtttgttgacggtgaattaactgctgctgataccggtgaacttcaattgactgcctatggaatctcaggaattccggtattccagatcagccgctatgcatcgaaagcattatatgagcagaaggaagttgttgccatgctggattttcttccagaatattcggttgatgaagtgaaaattcttctgaaagaacgtgccaagcgccagccggaaaagacagcagaacagttctttaccggcctgtttcatgaaaaattggccgctgtatggctgaaatttaccaaaatcaagaaagagaagctatgcggcgactttacagatgcagatattcagaggctgtcatggatgatcaaggaattcaaatcacctgtaattaagacaaattcttatgaacaggcacagatctgctgtggcggcgttgatacgacacagattaatccagaaacaatggaatcccgacttgttcccgggctttattttgccggagaactggtcgatgtagatgcaatctgcggtgggtataatctcacctgggcgtgggcaagcggttatgttgccggacagtctgccgcatctgcataatcgcctgctgctaacttgtaaccaatatctggatgatatactttaatattagatttcctgaaagaaaggatagataaatgatacgaattaatcagctgaaactacagattccacacacggaagaagctcttgaaaagaaaatacaaaagacacttcatctaaagaaaggggattcttttacttatcggattcaccgtcagtcattagacgcacgcagaaaaccggagttgttctatgtgtatacggttgatgtcactgtttccaatgagaatgctgttttaaagcattgtaaaggaaacatccagaaagtagaagagaagcattaccagattccatctcacggaacagagattctgaatgcccgtccggttgttatcggcagcggtcctgccggactattctgcgcttatctgctcgcactggaaggataccgtcctttggttcttgaacgtggtgcctgtgtagaagaacgtaagaaggatgtggatcgtttctgggagaccggtgtgcttgacccttcttccaatgtccagttcggtgaaggcggcgctggtacattttcagatggaaagttaaatacacttgtaaaagataagacaggacgtaaccgtttcgttcttgagactttcgtaaaattcggagcggacgaagatattttatatgcacataagccgcatatcggtacggatgtcctgattgatgttgtaagccagatgcgtcaggagatcatttcgcttggcggtgaattttgttttcatacacaggtcacagatgttgatctgacatcaaaaacactgaaacttgttcacctctcagagaattccgcagaagaagtatctgccggagcagccgtttttgcgatcggtcacagcgcccgtgatacatttgaaatgctttataagcatcagattccgatgcgcgcaaaatcatttgccgttggagtccgtatcgaacacccacaaacattgatcgatcattctcaatatggaagagatcggggaaatgatcttccggcagcagcatataaactgaccgagaacttggacaatggaagaggagtctatactttctgtatgtgtccgggcggatatgttgtaaatgcttcttctgaagagcatcgtctcgcagtcaatggaatgagctatcatgaccgtgccggagaaaatgcaaacagtgctgtgattgtcacagttactccggatgacttcggttctgaccatccgcttgccgggatttctttccagcgcagcttagaagaaaaagcttatcaggcaggacagggaaaagttcctgtccaacgttttggcgactttaaagaagatcagatcacaacttcttatggtatggttcattcttgcatgaaaggagcttctgtctttggggatgtacgtggtatctttccagaagaaatcgcacagtcgcttgaggatggaatcacagcaatggatcataagattcatggatttgcagataatgatgcattattatccggtgtggagagccgaacttcttcccctgtaagaattgaaagggatgagaactttgtctgtgcttcctgtgactggatctatccatgtggtgaaggggccggatatgccggtggaatcacttccgcagcgatggacggaatgaaggtcgccgaggcaatcattcaaaaatataaatcttaatcatttatgaaatttgtggttttttggtatcttctctatacacttttttgaaactgtgctaaaataaatcgttgtattatgtcatcgcagtgatatgattcacatggaaaatagaaatacagaaacaatcaaaatgatgtatcttgaagaccgtccttatgaaaaatgtgagcagtacggtgcagaacatctgacagatgtggaacttttagctgttttacttcgtaccggaacgaaaggggagaattcgcttcggcttgcccagaagattctgcatccaccatttggctctgaaggacttctcagcatcccacagtggtctatggaacaactgctgaagatcaaaggaatcggaaaggtaaaatccatccagattctttgtctggcagaacttgcaagacgtatggcgaaagcagaagcctcactgggattggatttttcctccccggacagtattgcacgttattatatggaggatcttcggcataagaaacgggaagtaatgaagcttttgcttctgaataccagatccaggctgatcagtgagatggatgtttcaacaggaaccataaattccacacttgtttctccacgggaactgtttgtggaagctttgcagaagaatgctgtatccattattcttttgcataatcatccgagtggagatccgacaccaagcaaagaagatcttctgacaacccggcgcgtccgtgaagcaggggctttgatcggtatagaacttctcgatcacatcattattggagataattgttatttcagtttaagggagaaaggattcttttctcaagaatctgcaaatagataagggaatggagtgtatttatggccaggaatgtatatgggttagatcttggaacttatgatatcaagatttttgataagaaaaaagaccgcatatggcatgccaagaatgtaattgccatgaaagataaaaaatatattttttctgtcggagacgatgcttatgagatgtatgaaaaggctccgggaaatatacagatcatatttccgatgaagaatggtgtcattgcccgttttgatgacatgcaatatcttctcggagatcttttgaaggaagagcgtccgtttatccgtggggcagaatatgtgattgctgttcctacagatgtcacagaagtagaaaagaaggctttctatgatcttgtgcttcattctgaagcgaaagcaaaatcagtaagaattgtagagcgcggtcttgcagacggacttggacttgggattgatgttctggaagaaccaggagcttttatcgccaatttaggtggaggaacaacagaactttccgttctttcctacggtggtattgttatgaaccgtctgcttaagatcggtggcgaacagctggatagtgcgatcgccaatcttgtccgtcattctaaagattttataattggccgtccgactgccgaacggctgcgaaaagaatttggagtttttgaccagtccaccggaagctttcttactgtatacggcagagatatgatgcgcggcggtccgtcgcacattgacattccaatcagtcttgtacgggcagcgatcaaagaacctttgagagaatgtgtgcgggccattcattccatgctcgaccgtacgcctcccgatgtccggagaaatattaataaaaacgggatttatattactggaggacttgctaatctgcgagggatttctacttatctggaagaaagtatcggtctgccggttcacatgaaaacagaccctgaactctgtgccgtcaaaggtctgcagaggatcatactgaataagaccttgtatagaaaattaagttactccatgttagacgaagattataggtggttaagataatatgaaaaaaaagaagaatcagacttctgttatgaacagatatttacttataggactttctgttttctgcatttttatgatgctgttatcttccttttcagacaaagtaggaggtccatttaaagttgttgcaaatgtaaccgttatccctcttcagcagggaatcaatcagattggtggctggatgggagatatgaaagacaatttccaaactctgaaacaggtacgcgcagaaaatacaaagcttcagaaacaggttgactctctgattacagaaaataacaatctgcagcaagaacgttatgagcttcagagactgcaggaattatatcagttggacaagaactatgcggattacaaaaaaactgctgcgcatgtaatcgggaaagattccggaaactggttcagtacatttaccattgacaaaggaagtaaagacggtattgccacagatatgaacgtaatggccggaagcggtcttgtcggcattgtcacagaagttggtccaacctgggcaaaagtccgttctattatcgatgattcaagtaatgtaagtgcaatggtactttctacttctgaccgttgtatcgtaagtggagatctgtcacttatgagcgataaccagattcgttttggtcagatggaaaacaatgataatacggtttccgtcggagaccagatcgtcacttcttatattagtgataaatacctgcagggaatcctgatcggatatgtcagtgaagtaacggtcgactctaacaatctgactcgttccggatatattacaccggctgtagattttaaaaatcttcaggaagttcttgttatcacaacaacgaaagcggatttggttggatccaatcagagcgaataggagtgaatactcatgaaattaatgaaatttaaaagagttgctgtaactgtactgatcgtacttgcagcatatctgctccagtgtaccttattcaatcatctggaacttgccggaattaaacctaacctgattctgattgtcacagcatcctttggttttatgcgtgggcagaaagaaggaatgctggtcggtttctttgccggccttatcacagatattcagtttggtacaattttgggattttatgcattactttacctggtaatcggttttgtaaacggattatttgaacagctttattttgatgaagatatcaagctgccgttatttttgatttctgtcagcgaatttctctacggtatcatcatttatttgctcatgttcatgttgcgaagtgattttaactttttatattatctcaaccgcatcatcgttcctgaactgatttacacaatcgtgatcacactgggattatacccactgattttatttattaaccacaaacttgaagcagaagaaaaaaggagtgcaagtaaatttgtttagaaatattttagaccgtctgaaagaagccggagcttacctgatgcagtcaagactcgttactttgatcattatattttgtgtcagttcttccatcctgatcggaagattattctatcttcagatcgtaaaagggtctgattatcttgaaaactacgaatattctatccgccggacgacatctgttgcagcaacacgcggaaatatttatgaccgtaatggaaatctgctggcttataaccagctggcttattccgtgacaattaatctgtcaaccgttgaaaactccatcacaacagataaacgttctgaaaaaaatgcggcattaaataaaatcctggatcaggttctttctatcgtagaatcaaatggagattctgttgtttcaagctttggtatcatcctggattcctccggaacctatcagtttacacagtcaagcgatacccagaagctccgttttattgcagatgtctatggaaaaagaacaatagatgaacttacagaaaagcaacagaaccaaagtgcagcagatatcattcattatctttgtactgatgaaaaatatggatatggccttgatgacagcacattagagcctgcttatattttaaagatcatcaacatgcgttatgcaatggcattaaatgcatatcagcagtatattgatacagttcttgcatccgatgtaagtgacgaaacagcagcagcaattatggagaataaggacgttcttaccggtgttgacatttcagaagattctatccgaaaatataccgatggaatgtattttgcatctattatcggatataccggacagatttcccaggatgaatacgatgcgctggacaaggatgaaaagaaaaagtactctctgtctgatattgtaggaaaggccggcattgaacaaagcatggacaatgtccttcagggcacaaaaggtgaaagaaccgtgtatgtagataacctcggacgtgtaactgatactgtcagccggaaagatcctgaagccggaaatgatgtatatctgacgattgataaaaatcttcaggaaagtacttataaacttctggaagagaagattgccggaattgttttatccaaactacagaatgttctggaatacgatacatccagcgtagatgactctaagaatctgatcatcccggtcagcgatgcatattataatctgattggaaatgccgttatcgattccgggcacttttcaagcagtgatgcaaaaactgccgagcagcaggtttattccattttccaggaaaagaaaacggcgacgatttccgagctcgaatcagaacttcagaactcacaggccagcgcgtatacagatctttccaatgaaatgaaagcatatatggattacatctgtgataccctgctgacaaaggatacaggcatccttatgtcagatcagattgataagaatgatgctacttatattgcatgggcaaaagatgagacaatcaatttatatacttacctgaattatgcgatttctaaaaactggatcgatacttccaaacttggaagcagttcttattccagttcagaagagatttatcaggagattttaaaatatttaaaagaatatttggcagatgacagtaatttcgacaaacttctctacaaatatcttataaaatcaggtagtgttactggtgaacaagtttgtgctatcgtatatgaacagggtgttcttcctatggatgactcgacatataacggattactcaacggagagacaaatgctttttcctggatcaagagcaagctggaaagccttgagcttacacctggtgaactggcacttgagccatgttctgccggtgcagttgtaacaaatccaaataccggagaagttttagcatgtgtttcttatcctggatatgacaataatcgtctctcaaacgtaatggatcgttcttattatgtgcagttgagcatgggtatgtcacgtaccttctacaacagagcgacccaggagaagacagcgccaggttctacttataaaatgctttcttctgtagccggtctgacagaaggggtaattaatggaaactcctatatcagttgttcaggtgtatttgacaagatcacaccaagtccaaaatgctggatttatccaagtgctcatggaagtctgaatgtagtaggtgcactgcagcattcctgtaatgatttcttctatgaagttggttatcgtcttggacaagactcgaatggtaactatgacagtgataccggccttgaaaaactggcaaaatatgcaaaaatgtttggatttgaccagacgtcaggaatcgaaattcctgaatcacaacctcagatttctgattctgactctgttcgatctgccattggacagggtaccaacaactatactgtcagccagatcaaccgttatgtaacagccgttgcaaaccgaggaactgtttacagtctttctcttattgacaaaacaaccgattcgaatggaaaactgatcaaagattatactccggaagttgtaaatcagatggatgagatcagctcaagtacatgggatctggtacacaatggaatggaaagcatggtaaaaagcagctccacctttgccggaatggatatttccatgggaggaaaaaccggaactgcccagtatagtaagatgcatgcagataatgttctgtttgtcggttatgcgccggcagattcacctgaaatttcaattgctgtccgcattgcaaatggatatgcgtctacctatgcagctgaaattggaagagatatcacaaaagtgtacttcaatccagaatccgccgatgaactgcttcaaggatatgcttcttctttaggaactgcagaagccggtgattaattaagataacgaaaggggatgggatcatgagtgaactggtaacaataaaaagcagtcattccggtatagagctgcggcttaatgccaacctcccattcccggatcttttaaaagctgtagaagagaaattccgacaatctgctgatttcttcaagaatgcaaagatggcagtttcatttagcggaaggacactttccatcagcgaagaggagcagttaatacaggttattacgcagacgacaaaccttgagattatctgtatcattgatcatgatgaacgcaaggaactgatctacaaaagagcggtagcacagtgtttatctgaacgtgaaaaatcagatggacaattctatcgcggaacattaaagcgaagacagcttcttgaatccgaatccagcattgtgatcttaggagatgttgaattcggagctaaagtagttgcaaaaggaaatattatcattctcggtactctctatggatctgttcatgcgggagctgccggtgacaggaatgcttttatcattgctctctccatgcagccacagcgacttgtaatcggagatattgaagcaaaacgtcaactgatctatcaggacagcctttccatcaacggaccgcaaattgcagttgttgacggaaaaagaatttaccttgatccactgatagaataaatctttggaaagacataagcatgggaaataggaggaatattcaacatgggtgaagtaatcgtcattacatcgggaaagggcggtgttggaaaaacaacaacaacagcgaatattggaattggtctgtcttcagcaggaaaaaaagttcttgtaattgatacagatctcggacttcgaaatctggatgttgttcttggacttgaaaatcgcattgtctacaatcttgttgacgtcattgaaagcaaatgtcgtctgaaacaggcagtgatcaaagatacgcgatttgaaaatctgtacctgctcccatctgcccagacaaaagataagacaagcgtatcaccggaacagatgaaaaaactgattgacgaactaaaagatgattatgacttcattcttttagattgtccggcaggaattgaacagggctttaaaaatgcaattgcaggcgcacagcgttccattgttgttacaacacctgaagtttcctcaattcgtgatgctgacagaattattggattacttgaagcttccggaatccggaaaaatgaacttctgatcaatcgtctgcgcgttgacatggttcgcagaggtgatatgatgtctgtagaagatgtcacagagattctagcgattgatctgcttggagtcatccctgatgatgagtctgttgttgttgcaaccaatcagggagaaccggtagtcggcgaagattccttagccggaaaatgttaccagaatatctgtagacgtctgttaggagaagaagtcccgatttccgattttaatcataaacccggacttcgcagtaaactctccagtctttttcataagaactaggaggtcacattatgagtgtaccttctgttacaattgcaaaagacaggttgcgaaatttgctaattactgacagaattcaatgtacacccgatatgatagaatttctgacatcggatttatatcagacgatttctaaatacatagaaatctccccggaacaatttgatgtcaaaataacacgcacggatatacatataaaatatacaggagaaaaacattgaaatcattttttactaatttgaaacagcgttataatattagagattataaaatcagtctggtttttctggtcactctgatttcactggtcggaatccttatggtccgaagtgcaagacctgatttaatgaatcgtcagattatgggcgtttgtcttggtctgattgttatgtttattatctctttcattgattataaatggattttaaacctatattggccgctttatgctctgaatattgttatgctcctggctgttttggtttttggaacaaaagtaaatggcgcgagaagatggctgaaccttggatttacacaattccagccttccgacctcacaaaaatccttatgattctgttctttgcaaaattcttaatggaacgagagcagaagattaaagaacccaaaacgattattcaggcaattgctttaatccttccatcacttgcattgatttacaaacagccaaacttgtctacaacaatttgtattgccgcattgtttgctgtccttctttaccttggaggattaagctacaaactcattggaaccgttcttgtaatcacaataccgacgatcattatactgcttgttgttgcaatacagccaaaccagccattcctaaaagactatcagcaggaacgtatccttgcatggctggaacctgaaaagtatgccgacgacgaatcttaccagcagttaaactccgttatggcaattgggtccggacagctgaccggaaaagggtatgataatgacgcaacaacatccgttaagaacggaaatttcgtatctgagccacaaacagactttatttttgcaattattggtgaagaattaggatttgtgggttgttgtggagtcataattttgttattattaattgtgatagagtgtatcttaattggtttgaaggccaaagatacaggagggcggatcatttgcggaggcgttgcttcactgattggaatccagagctttattaacgtcagtgtagctacaatgatttttccaaatacaggcttgtccctcccatttgtcagttatggactgacttccgtagtatgttttttcatgggaatcggttttgtattaaatgtaggcttacagcctaataaatatcagtaaagagaggataccactatgaatatcggattagtagcgcatgatgcgaagaaaaaattgatgcagaatttctgcattgcataccgtgggatactcagtaagcataatttatatgcaacagaaaccaccggtatactggtcgagaatgtaacaaacttaagcattcacaaatatcttgctggacatctcggaggaaaacagcagctcggctcacagattgaacacaatcagatggatcttttgattttcttccgtgatccactgacacctcactcacatgaaccggatgttaatgacattgttaagctttgtgatatttataacattccgatcgcaacaaatatcgcaactgctgaagcattgatccttgctcttgacagaggcgaccttgactggcgggagatgtatcgataatatgagtaaaccatacaaaaagaagagaagacgaagaaagcaacggcattctgtcagccgcatacttattcctgtcatatgtcttattgttgtattgtccggagctgtcggcggagtctggtattacaaagaatatggtggtgatcctgtccggacatatgagacatccacttataactctaatttataccaaggaagtttgtttgctgatgatttatgcgttgctgctgatgatgtggctctcactggatttgatgatgaggattctcttcatgctgcaggattattcaatctaaatgataaaacagttgaatatggatataaactttatgataaattatatcctgcaagtacaacaaagcttatgactgcataccttgcttttaagtacggtaatatggatgacattgtaactgtttctgacagtgtttcaagctttgcctctgatgaagtagtctgcaacctgcagcctggtgatacagtgacactttatgatttattatgtggtcttttacttcgttcaggtaatgattgtggtgttgctatcgctgaacatatttccggaagtgtagaagcttttgctgagcttatgaactcagaagcgaaggctcttggtgccactggcagtcatttcgtgaatcctcacggacttcataatgaaaaccactatacaacagcatatgacctgtatctgatctttaatgcctgcattcaggatcagagatttatggacattatttccatggattcttatacaatgaatcttaccggagcagatggtacaacaagaacatttgatgtagtcccaaccaactattattccgcagggaagatcaatgcccctgaaggaattcgtgtatttggcggtaagaccggtaccacagatgaagcaggatgctgtgtgatcctttatagcgaagatctggaaaagaatccttatatttccattattatgggggctgaagataagagttttctttaccaggagatgaaccggcttcttgaggctggagaaacaactaaaacagaataaagaataaccgatatgaaaaagccatgtggcacagaacaacaaattagaagctttcatttttaatctgtccgcatggtttttttctatcttatttcatgtaatattctcctttaccgtttcctgttttcagtaacgctctttaatttattaatatgtattcttcccctgaaaggctggaaatatacacaaaaaaatgatatactaacaaagttaaagcagaaatgacaggaggtaatatttttatcttggcaaagaaaaaaaacaagtctgtaaatataaaaagatataaggcaaaaaaagaatttaatattggaatgtttctgtttgcagttgtatttatttatcttattgttactattaccgcatatcttttagaagataagccttctatttatgaagtgcgggagggcagtattgtgaaggataatacctataccggattgatcatccgccaggaaacaactgtaaatgcagaatcgggcggctacattaattattatcagaatggaaacagcaaagtcaaatatggcgcacctgtttatgcaatttcaaagaatgctttgaattttgatgattcatctacggaatcatcttcaactgcagatcttagtcctgatgttcaatcaggacttgtgacacaacttcagacattcaatgaaaactatgacaattccaacttttcaagtatctataccttaaagaatgagctgcaaaatacattgcaaaatgcataccgcacaactaaaactgcgcagcttgcatctgtaattgagagcagcggacaaactgtcacaaccgcttctgccggacaggacggaattgtttcctatacgattgatggtttagagtccttaactgttgacaattttacagcagataattttaataaaacaaattataaagtaactgagcttaccgatcagatgaagatatcaagcggttcaccggcttaccgcttgattaccagtgaaaactggtccgtagtgatacctttaaaagaagacaccgcaaaagaatttcagaaatctaatttacagaatgtgcaggtccgcatagataaagacagtgaaaagatgtggtccgctttctctgttcttgaacgagatgggaatttctatggtgttctgacctttgacaactctatgattcgttatgcatcagagcgttttctgaacatagaacttatcttagaagatgagtgtggcctgaagattccaaaatcttccgtagtagaagagcagttctttgtaattcctcatgattacattacaaacggaggtaacagctctttagaaggtgttatggttttggattcaaaaggaactgcctcatttcaggctgttgatatctatgacacctccgatgatggagaagtttatttaagtcgagatcagctgaaatccggaacagtgattgtaaaaccggattcttctgatacttatacgattgatacccaaaagccattaaagggagtctacaatatcaataaaggatacgctatttttaaaaaagtatccattttatgtgaaagcgacgaatattacattgttcaggaaggagattcttacggactttcaaattacgattatatcgtacaaaacggagccggtgtttcctctgatgatgttgtatttcagtgatttgattttgtagccctttgaaaattggatacaaaatccaaaagaggataatcaaatctaaaaaaggagagataacttatgctagaaacacagttaaaagaagtagaagcaaagattcaggcagcctgtgaccgtgccggacgcaagcgggaagaagttacattgatcgccgtaagtaagacaaaaccgatagaaatgcttcaggaagcttacgatctcggtgtccgtgtgtttggtgagaataaagtgcaggaaatcacagccaaatacgatgcacttcctgatgatatccactggcacatgatcggacatctgcagaccaataaggtaaaatatattattgataaagtagatctgatccactctgtcgattctgtcaagcttgcagagacaattgaaaaggaagctgcaaaacataatcttacagctaatattttaattgaagtaaatgttgctcaggaagaaagtaagtttggacttaaaacagaagaagttctcccgtttattgaaaagattgcaaatttcgaacatatcaaggtctgcggactgatgacaattgcaccttttgtcgataacccggaagaaaatcgtcaaattttcgcaaatttacataaattatctgttgacattaatgagaaaaacattgataatgtttatgtgaacatactttcaatgggaatgaccaatgattacgaggttgccatagaagagggagcaactatggttcgagttggaactggtatctttggtgcaaggaactataatatctgacttaatttattaacctgatgaatgagttactgtttacaatatttttgaacagtaattgaatagtatcattttttcgttggatcgtatgaataaaaaagagcgccacctgaaaaaggggacaagataggagtgtaaaaatgggtgtatttgataaatttcttgacatcatgaagttaaatgatgacgattatgatgacgatgaattttatgatgatgatgattttgcagatgacggtgattttgaggaaaaaccgcgtcgttctttcttcggtaagaagaataataaagaggaatctttcaatgactttgatgctgatgaagataagaagtttcagccttctgcttccagcaaggttacaccaatgcgtcctgctgcaaaacacggcggaaacatggaagtatgcgttgtaaaaccaacttctgtagatgattcccgtgagatcacagagacattacttgcaggccgtactgtaatccttaacttagaaggtatggatcttgagattgctcagagaattattgattttatttccggagcagcatttgcgatcagcggaaaccttcagaagatttccagctatatcttccttgttacacctacaaatgttgatatttccggtgatcttcaggatcttctcagtggatctatggaaacaccaagtgttcgtggaagatactagaatttaacttcaactataggaactggattttagaattattatgataaaagaaaatcagaaaaaagaaacaaagcttttggaacacagatttattgaactttccagaattgcttttgaacgtgaaattgttacatattcggattttcttaacctgaatgatcagaatatcctgcataccctgccaaagaacaagctttattcaagatatgtcctctttggcgggtatgatatggcggagcgtcagatggctgcatttatccctgaggctctttctttgcgttatggggtatctgatattactccgaaagagattgattatccgttttgtgccgtgaaaatagaaccaaaaaataaaagattttccgaagacctgactcacagggattttcttggttccatattaaatcttgggattgaccgttcaaaaaccggagatattcttgtgacagaagattcagcacttctttttatcaataaggaccttgtatctgttgtaacagaagacttaacccgggttcgccacactgttataaatagttctgtcatcaacttagatatgataaactacacacctgatttccagcagataaaaggaactgtttcatctgttcgcttagacagcctacttccacttgcattttcttcttccagaagtaaactatccggactcattgaaggcgcaaaggtctttgtaaacggcaaattgattacaagcaatggatatcaggtaaaagaaggagatcttatctctgtacgcggattaggtaagttccgttttgaggaagcggggaaactcactaaaaagaatcggatcagtgtaactattcagaaatatgtataatctaaaaagcttagaaaagaggagcttatcgactcatgaataatacaaaaacaaagacaaagagttatcttttcgctgccattgggtttctgctcacattagcacttgaccaatggaccaaatatcttgcatctactatcttacgccgtctcgagtctttctctttgatttccggagtttttgaacttcgctatcttgagaaccgcggagctgcatttggtattatgcagaatcgacagattgtgtttgtagtcggaggtattattatacttgctgtcattttgtatctgtaccagaagatgccatttacaccacattacagaccactgcgtatctgtgctgtactgcttgcatccggagctgtgggaaatatgatcgatcgtgtgaaacttgattatgttgttgactttttctatttccgactgattgattttccaatctttaatgttgcagactgctatgttgtaattgcatgtattttatttgttgttctcattttattttattataaggacgacaacgattttgagtttttaaattttaagaacagataaaaacgcacaacaggaaggattctgaaagcttatggaagaacttcattttaatgcggatattacaggggaaaggatcgataaattccttgacgggagaatagagagcctttcccgttcttatatccagaaattaattaaagaaaaaaaaattcttgtaaatcaattaccggttaaagcgaattacaagttaacaacaggggatactatcattcttcagatccctgacccggaaccacttgatattcagcctgaaaatattcctctggatattctctatgaagatgatgacattctcgtcgttaacaaaccaaaaggaatggttgtacatcctgcaccgggacattacagccatacgctggtcaatgcggttctatatcactgtggagaaaacctgtcgggaatcaatggtgtaatccgtccgggaatcgtccatcggattgacatgaatacaaccggttcccttctgatctgcaaaaatgataaagctcatcagattcttgcagaacaattaaaagaacattctatcacaagaaagtatcacgctatcgtacatggcaatctgaaggaggatacaggcactgtgaacgctccgatcggtcggcaccctacagatcgtaagaagatgagtacaaaagcaccaaatgggcgacatgcagtcactcattaccgtgtattggaaagatttggtaattttacctacattgagtgccagcttgaaaccggtcggacacatcagatccgtgttcatatgtccagtatcggacatccaattctgggcgatgagatttatggtcctgcaaaatgtccttataaactccagggacagactttgcatgcaaaaatccttggtatcactcatccatctacaggagaatatatagaatttgacgcacctttgccagactattttaaagatttattaaataaattaagaaaacaaaactaagtataagaaatggtgtagaaaatagtgaattgacattgtcttttttcatctttttggttataatatacataagatttcgcatagacttgaaaaggagtgttgcttattatgaagacaaatactattataacaatcggacgtcagtacggaagtggtggaaaagagatcggacatttcgttgccgaggcatttggaattaaattatacgacaaggaaatgcttgcgcgtgcagcaaaagaaagtggtatctgtgaggaattatttgagactcatgacgaaaagccaacgaacagttttctatattctcttgtgatggatacatattctatgggatatgccggcaacacatacacggagatgcctatcaatcacaaagtttttcttgcacagtttgatgcaattaaaaagattgcagatgagggaccatgtgtcctggtaggccgttgtgcagattatgcacttgaatcctatccaaatgttgtcagcatcttcattcgtgcagatatggaagaccgtattcgtcgtgtagcaacaagacttgatcttacggatgcgaaagcaaaagatctgatcaataagacggataaaaagagagcaagctattacaattattatacaaacaagaaatggggcgaggcagccagctatgagctttgcttaaacagttctgaactcggagtacaaggtacagcgaaagcaattgaacagtatattcttttaaaagaaagtattgaaaaagaagccagaaatattgtttaatcttatttattaaaatgtatagtgcaaaggatacagaagagcagtagtgcattctttctgtatcctttttatctattcttattctttttacttcctatacttcacgaagctttacagcacctgccgcctgacggcgtcggtcttcatcgatcgctgcataatgtttctttgttgtattgacatctttatgccccagaacatctgcgacaagataaatgtctccggtttctttataaagtgctgttccgtaagtgctacgcagtttatgtggagttatcttcttattcggagtgacctccctggcatatttctttaccatattttcaacagcctgaacgcccatacgttttcgctgggtagacaagaacagtgcgttttcatgaccggagagtggtacagtttgctttctggtcgtgtaaagatacgtctttaatgcattctcaacctcttcaccgaaatacacaaccatctgattcccaccttttcgtgttacagtaattccgttattcttaaaatcaatatcctggagatccagtccaacacattctgatacacggattcctgttccaagcagaagcgtcagaattgccagatctcgattttttgtcttttcaaaatatgctttccgctgacctgtaagattatccccaccatgatcaacataatccaggagcattgcgatttcatccgtatcaagccgtataatcgctttctcatgcagcttaggcatctctacaagcaacgtagggttcttgctgataatttgccgtttaaaataatatccataaaagctacgaagcgcagacatctttcttgcaagtcccttttctgtgttcgtgatacatttttcttcgtcattcttatagaccttcagatattcctggtattcctcaatatctactggctccaggcgttccagatcatgtacctcaaattgttcgatcgtataatttttataaaccggattattctccataaggaaatgaaagaaaacacggatatcataggcataagaaatcctggtccgcgcagatgtcgttggttccaccgcacgaaaataatcctttgcaaatggaggcaatgtcttcagaatttctctaagacgtaatgtgttatctatatatgtctgttcatgatatgtttttctgttagaagtttctgccatattaaaagctcctttatagattcaaatttactgaaaaccccatatttcttatatattttaacataagtactgtttttcgtctatatcttttggaaaaatcggtatttgtcgtatagattgatttctgttaataaaatccgaagagactatctgctgctatttaaagcgctatttctggaaaacagatagcaatcttcttcggattcagggagtgtatatatcaatacatagggtgtatattgataccatttataatttttcgtaagcgatcatcaggtattgacctgcatgaatcgtatctgaatcaagatgattcattaccttaagtgcttctacatattcgcttacggagccatatccgtctgtaattgtttcttctgcaatgctccaaaggctgtcacctggttcaattaatctacttgtgtaacaaatctcaatagcatctgaggttctctgttgatctatttcctttgccgaaactcggaacattccaaagtacatacagctgcagagaataaaaagaatactgcacattaccaaaccagaatgacgaataacaccatgtttcttttttgaatttactgaatgatttcctgaatactttttcataatccttttcctctcttttcgcttactgtatacctatcttctgttattgctatgtatcgaacatctgttcttttatgttttcattatatcgttcgaacaaatgtttgtcaagcattttacttcataaaaccgaacatattttcgcaacaaatgtttgctttctaaaaaatgctgtgttattatgttcttatgattatagtagattcggagggaacaatatgtcagaagggaatattactcctaagcaaaaagagattttagaatatataaaagaccagattttaacaagaggctttccaccggcagttcgtgagatctgtgaggctgtgaatttaaagtctacctcttccgttcattcgcatctggagacgctggaaaagaatggttacataagaagagaccctaccaagcctcgtgcaattgagattctggatgataatttcaacctgacaagaagagagatggtgaatattccgatcataggccgtgtcgctgccggcgaaccgcttcttgcagaacagaatattgaagattattttcctattcctgtagaatatatgccaaacaagcagacatttatgcttcaggtacaaggtgaaagtatgatcaatgcaggaattctgagtggggattatgttattgttgagcagactccatctgctgaaaatggggaacaggtagttgcactgattgaagatggcgctacagtcaagactttctatcgtgaagaaggtattatccgcctgcagccggaaaatgatgcatatgatccgatcattcttacagatgtcactatcctgggtaaggtaatcggtgttatccgtatgtattaaatctcattactggatataggatttttaattagaactcaaagtataaaaaactggcagaatgtagtactccactactcttctgccagttttttataattctcactatttatgcttcaagatcttcaacagacacatgatgtccatctttccagattctctccaaattgtagaactgtctgttctcacgatcaaagacgtgtacaataatatcaccaaaatcaagtaacacccatcttccggatgcatttccttctctctgtaccagagaatatcctgctttatgcaattcttcctccacattgtccacaagggcattcacctgactgtcactgtttccatttacgatcaggaaataatctgcaagtacagacacgcctgagatatcgatgatctggatatcttctccttttttatcactgagggctgtatatgccagctttgccatttcttttgactgattcatcttttattctcctttgtcgctataatattgataagtttcaatgctcatcggatctaccggcttaccattcttacgcagataattaaccgtattccctgcacaaagacagattgcatggtcaatatcgacaaacacagtttcacggatctcctgaagaccaggaattatctttctgttcggttcaatataatcagcaatataaataatcttctcaagcattgtcatctccggtcgtcctgttgtatgccatgtaattgcacttaaaacgcctttattggtcacaccatactctttctccgcgaaatatgctcccagtttcgcatggaccaatgccggcatctcaagttctgattgtgtaagcagaataccgtgtttttgacatctctcaacctgttcctgcgcagaaccatactttccacaatcatgcagaagtcctgccatcatagcatcatcgatatcttcatgataacgcattgcaagagatgctgctgtatacataactccgattgtatgttcaaaacgatcttttttcagctttttttccagttgttttctaatgttaatgaaagcttctttcataatcgtgttctgtctcctctctggttactgttcactccacaccaccattttgacaagtgcagataaaatatgctttaaatatatagattcttttctttgatataatccgcgacaacatcaggcaccatataacgcacgctgagtctctttgctgccctttctcttattgtagtggaggaaatctctaccaacggtgcgcgaagcagttctatatgcgctccgtatgcttccgtgagatatcgtatctgtcccttcattgctgaagcatctttgtcgtcacgcattgctgcaagaatcgtacaggtcgtaaaaatttttctgaaatctttccactcttcaaaagcaaacagagaatccgctccgagaataaaataaaattcatcgtttgggtagatctcgttaaaatgcctcattgtctgatacgtataagaatgcttcttcgtatccgcttctgaaagattcaatgagaaattcggattactttttattgcaagacgaaccatctcgatcctgtgatgcattgcttcttctgtatcgagtgtctctttgtgtggaggatttccattcggtaaaaaccagatctcatcaagtccaaaatcttcataagcaaactcaccaagaagaagatgaccgatatgaatcggctcaaatgtaccacccataataccaatcttcattgtctatacctgttccttttctactatggaaaacacgctctgcgagtttcctatattcaaattcagcttccgaatcatataataactcagaagctgaaaaaataattattttggaagctgaattttctttttatcgtcttttccttctttgtaaagaacgattttctttccgattacctgaacaacctgagactgtgttctctctgcaagtgtctctgcgatttctctcggatcatccatgcagttctttaaaacactgatcttgatcagctcacgtgcttccagtgcctcggcaattgcctccgtaagccccggattcatgcttgcctttccaacctggaaaatcggatccattgtcatcgcaagtccttttaaataggctctctgttttgtagtcataatattctccttatttataataatcaaactgaagtccgtacattctaactgtgtcaccttcctggatgccagctctctcaagatcttcaagaatacctgaatctttcaggaacttctggaagaatgcaaatcccttctctgaatcaagattcgtatatccaagcattttctcaatcttcggaccttcaactacatacattccatctgcctgttctaccgtataaggaagatcttcatagatcagttcatcatccgggaagtattcctgctcgaatactaccggtttctgatccagcttctgaagctcattacttacgtagtagagaagatcggagattccttttcctgtagctccggaaataggaaatactttgattccctttggctcaaactcatctttcaggcgctgaaccggatcatcttccggatcatagatcagatccgtcttgttcgctgcgattacctgcggacgttccgcaatttccggattgtaagcagcaagctctgcattgatcttatgaatatcatcaaccggatcacgtccttctgttccggctgcatcaacaacatggatcattaactttgttctctcgatatggcgaaggaactcatgtccaagaccaacaccttcggatgcaccctcgattagtcccgggatatcagccataacgaatccctttgctccatccagatcgacaacaccgagattcggattcaatgttgtgaaatgatagtttgcaattttcggttccgcatttgtaacacgggaaagcaatgtagatttaccaacgtttgggaaaccaatcagacccacatctgcaatcaccttcaattccagattcacttccagctctcttgccggctgtcccggctgtgcatacttcggaacctgcatggtagaagtagcaaaatgctgatttccaagtccgcctcttccgccttttaagacaacctgacgtctgttctctccggacatatcagcgataacttttcctgtaacagattctttaattactgtaccttccggcacacgaagaacaaggtcttttccgtccttaccgtgacagcggcgctttccgccctgttccccatcttcggcagcaaattttctcttatgtctgtagtcaacaagagtattcagcccttcatctacttcgaagatcaggtctccgccgtgtccaccgtctccaccgtccggtccgccgtttggtacatacagttctctgcggaagctgcagtgaccgtctccgcctttaccggaacggatcaatatcttagctctgtctgcaaacatattattctcctcttaatttgtatcaacaactgtttctgtatctttattcacatcatatatgcgtaaatttcttcatcatctgacaataaaagatttctttgaaagaaaaagcctcagaccttaaaaaacgtctgaggcttccttttgccatgtatgcgagtgaaaagattccgtcggaactttccagccaaaactgattactcagctactggatagatagaaacctgtttcttatctcttccttttctttcaaatcttactacaccgtctacaagtgcaaacagagtgtcatctccaccgcgtcctacgttaagtcctggatggatctttgttccacgctgtctgtaaagaatgttaccagcttttacaaactgtccgtctgctcttttagcgcccagtctctttgcctcggagtcacgaccgttctttgtagaaccaactccttttttatgagcgaaaaactgaagattcattttcatcatggtaattacacctccttgaaaattatgtcgatatatttctcgtagtcattgctgtcttctatctcttccagaccaagaatcatggaatccagcaataatgtggcatcatgtgatggtattccgtcaaaacggaactcaatacttccggtatcttcatccgaaacgcagcttgtctcatcatctgtaaaacgctcaattgaattcagcgcattgatcacgagagcggatactccggcacagacaatgtcttcaccggcctctgcatatcccgcatgaccctccatatcaaacccaacatattcctgccgttcggtcttataaatggttaccttaatcatcagaaacagattaagcgttgatcttttcgatctttacttctgtgtactgctgtctgtgaccgtttttcttatggtatccagattttctcttatacttgtaaacgataactttctttgctttaccgtcaccgattacagaagctgtaactgttgcaccttcaactgtcgggttaccaacaaccatcttgtcgttgttaactgcaagtacctggtcaaatgtataagtctcaccagcttctaccccaagtttctctactctaatgatatcgccttcagctactttgtactgtttaccacctgttgctataatcgcgtacatatggcacctcctattatcattactcgccaactatggtgtctgaaatcagaacttaaatacctcgttgtgcggcatactcatatatattaacttgcaaatttagatttgtcaatagggttcatctaatttttttattttttcataacagtattcaataatactttttcttgttatgattccaatgaatttcttctggtcatccacaaccggaacaaaattctgattcatcgctttctgaagaagatcctccatgtcagcatctgccgatacagcctcataatctgcttttcgtgggaagtcctggataaaaattgtctctgcctctttcaggttcagattcgtatacttcttgattccccagaggatatctccttctgtcattgttccgacatattcccctgccttattcagcattggaatagatgcatatttatgaaattccattgtttccaaaacctgacgtaatgtgctgtaatcataaataaaagcaacctcactcttcggtttcagaaaaaataagatattcatctcttttcagcctttcttggttttaaatctgtgtcagtacgaaaatctcatacaatgctttgatcgcatttttaaaatcatcatgacgtacaccaacgatgatattaagctcactggatccctggtcgatcatcttgacattaatgtatgcgtgagcaagtgcagagaagattcttcctgctgttcctcttgtagacttcattccacgacctacgatcgcgatcagtgcaagatcagactcaagctcaatgtgatccggatctaccgctttgtgaattcctgcaagaatctgctgttctttctcttcaaacttatctttgtggacaaagattgtcattgtatcgattccagatggcatgtgctcaatagaaacaccattgtcttcaaatacctgaagtactttacgacagaaaccaacttctgagttcatcatcgctttttcaattgtgatcgcagcaaatccgtctgttccggcaatacctgtaatagtatatttcggctgacagcatgttgcttctacgataagtgttcctttgtctgccggtgcatttgtattacggatattgatcgggattcctgctcttcttaccgggaagatcgcatcttcatgaaggacacttgcgcccatataagaaagctcacgaagctctttatatgtaattgtctcaattgattttgatccttttacaattcttggatctgcaatcaggaatcctgatacatccgtccagttctcataaagatctgcattgactgcacgagctacaagagaacctgtgatatcagaaccacctcttgaaaatgtaactacacgtccttcctctgttgctccgtagaatcccgggataacagcattcttagccttttcaagtcgtgcagacataatttcatttgtgatctcggactggaaatctccattctcatcaaaacgaacaacctctgttgcatcaataaattcaaatccaagatatgcagccataatcttaccattcaggaattctcctctggatgctgcataattgcttcctactttttcagaaaagttcttgcggatcacttcaaaatcctcatccagggagaactttaaaccgagtccatcaataatttcctgatatctatctttaattgctgcaagcttctctgtgaaatcttcgccattctcagcagccgcatagcagccatagagcatatctgttacctttgtatcagctgaaaaacgctttcccggagcagatggtacaacatatcttcttgattcttctgcacggataatatttccaacttttttaaactgttctgcgctcgcaagagaacttccgccgaactttactactttcttcattcttgctattcctccaatgtaattctgcgttgctgtttcgagtttcccgtgaacagtaacaatactgctttctgcattatcggttcattattatacagtgttccacagttcttgtaaacttttaaataagaaaacttataggaatttcttataaacattaataataatcaattaaaacgtgatctctccatattccgcccgtgcagcctttttcagatcatccggtttcaatttaatctgcattccaatcttcccgccacttacataaatgtattcctgatgctgtgcactggaatcgatcacagtcggaaattgcttcttcattccgattgccgtacagccaccacgcacataaccggtcaccgcagtaatatccttcacatggagcatttctactgatttttccccgactgacttcgcagcctttttcagatcaagctccgccgcaatcggaataacaaacacataatgctcgcctgtttttccaaccgtcacaagcgtcttatatacctgttcatgcggaagaccgattttatctgctgttgtgattccatcgacaaattcatcacactcataggtttcatattcatatgggatcttgttcctgtccaagattctcattgcatttgttttcagttctttcttactcattatattagcatctcctttgttgtctctgcctgcaaatgcatctgctattctatctctcttactgcttcatgcagcggcttacgcactttctttctcgtcacctcagcaagtccaagtgctgtaatatcaactaatgttgtctggatcggatctttcgcaagaaaatatcggaattcttttaataaagtttcctcattcttttcctcatcctgatttataaaatcaatcagaatgattccagacagattacgaagacgtatctgtctggctgtttccttcgctgcctccagattcatcttcaatgtagactcatcatcaccctttttacggacgtttttcccggaatttacgtctatcacggtaagcgcctctgttacctggatcaccagatatcctccatgtttcagccagactctttctgctaaggcatgttcaaccgctgtttctgtactataaatctttccaagtggataaccactgtcatcatggaaatgaaccagttccagattctccggcatttctttcttgaaatagctgcaaatcttttcatatatttctgcatcattcacaagaatttcttccatgccatccatatagacatttttcagatctgtaatataggacggtggagcagatttcaggcatgagaaacacactctggaagcagcatattttaaaagatgttcatattccgctttcagctgttcaatctctgtaaggacatcttcgaatgcagcatcttttgcattcgttctgataataagaccatactggtcattctgatattcctgaaggcgctccttataggcttccctgtctttttttgaaattttagaagatacacctattcttgtattaccatgcgtcaaaacggcatatctgcctgtcagactaatattaccggtcactgtcggaacctttgtctttacagcttccctgctgatctgaactaccagttcatcaccgatgcaaagtggcttcttcccaatcttatgcgtaaaaaatgcattctgtgcatctcttaaatcaaaataacaattaacgccaggttcgatctcaagaaaagctgcccctatattctgtacgatattctgtactttggcgacatatatatcgccaatctgatgcaccttttcctgttcgtcggactttgtacagtgaatctcagcaatctgatcctcttccagaaaaaaggtccacacatgattttcttttttctctatcaaaacttttcgtttcatctgtttcttctcattcctcatcgcctgtcatatcaacacccattgcctctaatggaatcaaggatccatcttcactgcgatctgtatacatttccagtctgtgatgctggaatttcacgctgtccggttcaattccaatgaactgacaaaatgcttccatcacaagatccggtttcagattctctacacttcctgctgccactttcaggtaaacagaatcgcctcgcagttcccatgcatagatcaatggtttaatgtcaacttccttctcgcttcgttttgtctgctttacgattcggatctctggctgttccataaattctgaaaatcgttctttccagccctccggaaatgctccctttctcacagatgtcagataatctgctcctgcaaggattgtcattccggtcatcttcttctcctcagcaattctacggatgcttacgatctcgattccctcaatctgacaggcttcgttcatccttctgactgcatctgcactgttgactgcttctgttaattcaatatcaaaatattctccgtcacttgtcagtccgattccaagcgggttagcaaatgacatgatcatatgcggactatatcctcctgaaaatgcaatcggaatatccgcgcgacgcatcactttctggaagaaacgcatcacatcaagatgtccgatgaatcggagagaaccatattttctaaatttaattcttgccttcataacagacacctcctccaaatttcgctgcgccacatccggaacactgcatacggcagttcggagttactttttcttccatcgcacgatcccattctctgcgcaggaactttcttgtcacaccgatatcgatgaaatcccacgggaacaattcatcttctccacgctcacgcagattgtaaaaatcaatatcaacacccgtgttctcaaatgcctgcatccaaagttcattgtggaaactctctgtccaggaatcgaacagacatcccagacgatatgcctcctcgatcgccttgctgatcttacggtcacctctggccataataccttccagaaccgtaacttccgcatcatgccagttatatttcagactcttacggtttaactgttctttaaattcatcatttacaagatgtgcacgtctcatatattcttctgctttacacatcggagcccactggaacggtgtgaacggcttcggtacaaagaaagaagaacttgccgtgatctgacattttccatgtctctgatcttttggaatctcataatatctacgggcaaccttttccgcaaggtgagcaatctctttcatatcctcctcagtctctgtaggaagtccaagcataaagtaaagttttacctttgtccatccaccttcgaaagcttctccggctccatttaagatcacttcttctgtcagacctttattgatcacgtcacgcattctctgtgatccggcctccggtgcaaatgtcagactactcttgcggatatcctgaaccttactcattacatcaagagagaaggcatcgattcgaagagacggaagagaaatattaattcccttattcttaaactcatcgatcagatatgttaccagttctttcaattcagaataatcactggaacttaatgaactaagagaaatctcctcatgaccggtattctgcagcatatcatgcgcatactgtttcaatcgctcaacatttctttctctgaccggacggtaaagcattcctgcctggcagaaacgacacccacggatacatcctctctggatctcaagaacaactctgtcctgcgttactttgataaaaggaacaaccggtttcatcggatacggcgcatctgttacatccataacaatctgcttcttaactacagccgatgcatattcattattcggtgtaaatgatttcaaagtgccgtcttcattatattctgcatcataaaaaatcggaacatacagaccctcgatctgcgctgcacgttctaagaactcccggcggctctttcctgaacctttccattccttataagcgtcaagcagctcatcataagccgtctcaccttctccgatataaaagatatcaaagaactctgcgatcggctccggattgtatgtgcacgggccaccgccaatcacaaatggatcatctaaagttctgtcctttgcatgcagtggaatctgactcagatcaaggatctgcagaatgttcgtataacacatctcaaactgaattgtgattccgaggaaatcaaagtccttgatcggatcctgggactccagtgcaaaaagcggaatcttctgttctctcatcactttatccagatcatgccatggagagtaaactctctcacaccacacatcctctctgcggttaaacatatcataaagaatctgaatccccaaatgagacataccgatctcatagacatccgggaaacacatcgcgaatcgcacatcgatgtcttccacgttcttcatcaccgcattcacctctccgccgatgtaacgggcaggtttctcgatttctaataaaatatcatcatctaatgctagttttctcatggatttctccttgtattttgtacttatgcatttatattacaaaattgtaaatgctacttttaacatcatatcttttgacgataaaaaaagcaacctattttctctttttatataattgttaacttactaagcttgttacagtcatatctttcagacatgtactccggtagtcactcggtgatattttatatctttctttaaatactcggttaaatgttctctgactttcaaatccactatccagacaaatttttgtaatagaatcactcgtattttccaaacgctggcatgcatagttcagccttgcatcgttaagatatatctacaaatccaactgtaattgcctgaatcagaagacttgttgaaaacgcaaaaataaaacggtaagatcccatctgcacacgctctttgctgttctttgtaatcagtgacgtaagtgctgaataagcaatattgtttgctgtataaaacacaccatttaacagtgtgtaagagataaagaaccatgcatatttagccgttgttcccaagctgactggtactgcaaaacagcagatcagcgtaatggcacaaccaatatatccatatagcatccagggtttcgcttttcccattttactgtgtgttttgtcaatcattgatccaaaaaatatatccgtaaaaccatcaaatagttttgatacggcaatcagggtacctacgacacctgcagcaagtcctactgagtccgtcaaatagaccatcataaaagaggtcaggaacgcatagactacattacctgcaatatcgcctgatccatatccaattttgttataccatttcaaatactttttttcttccatcgaatttctttgctcctcatcttcatcgcacttagaatttcaagatgtctaacagagtatgatgtctaattctagttttttctctgtttttgtctggttgctctgtatatccggactttacataacaatcagactctctttccttgtttacgggttacatgaaactttattatccctttatatacggtatcagtgtaaactggaaccggaataatacatcatcaaatcggtactgctccaatacaactggaccacaactgttagaaccaatgccatttagtgcatagtcaacacaaaatactacactatctgattctgtcagttcataattatgcgttttctcctcaagttcttcctgcgtataataagaagcattgaatgagaaggcattttccgcagagaccacaattccatatcggctgttgttaagctctacatattcacaatcataatggcttccattttcctgtgggcgaatataatcctcatgcaaatcatctacatttgcctgatacaaaccgtggctcgcagcctgatgtttgtcacaatagctttcctgtggtcccattccaaagtatcttacagctgaaagttttttatccaggaacatcctcacaccaaatcttggcaggtccggaaattcatcatcttttgttactgcaatatctgcatcaatctttccagcagcttctattttccatgtaatcgtcacatcaagtatcttctgtactgtctctgccacaacggatgcatggcttgtaatcttcacaccatgttttccctgcacaacctctgtcgtataggctcttgtgtaagccttatcatagtgggctttcttccattcagacttaatgtacatatcgttatctgttggagctctccaaatatttaattccatcggatggttcagatattcccgacctgcaaatttcatctctgtaaaaagtgcagtacgtttgtctatggtataagcaaattcacgccccttgatatgaatctgtgtatcattttcatttacctgtaattcagagtccactactgtttttggtatccatttctctgcaagtttacattttgtatcctctttacttacctcaatttcatcaaatccaagaatatggtcttcatccaacagtggcaattcttttttcagatggtaaataagttttaaataacatttcccattctctggaacattgatcttcaggtttgtttttccttccccatgtggtgccacagaaaactccggaagtatgcctttgctgatcacaagaccatcctgtgtcagctcataactaatcttcacataatctttcaagtcatcaaaatccatgtagttatgaagcaccagttctccgctttctttgttataggaaataactcttgccgggcgataaacattcttgtattccaaaagtcctgtatgtaccgttctgtccggatatactaatccatccatacaaaagttaccatcatgaatttcttcgccatggtcgcccccataagcatatatagtctttccattctcagcagttccatgagcaatcgcatggtcacaccattcccagacaaagccgccgcacattttatcattatcctgaatcatctggaagtaatcttcaaaatctccaggtccgtttcccatgctgtgacagtactctaccaaaaggaagggtttgcttccatctttatctagatattcctgaatttcggaaagcgctgggtacatccgactgtacacatccagattgctgtaatcatatgtttcatcataattacgatatcttgcactctcatattgtgtgatacggtctggatcaaaattctttgtccattccagtgctttttcaaagttgcaaccataagcactctcatttcccattgaccacataacaatacagaaacggtttttgtcacgttccaccatgagttttactcgatcaacgattgcctcttcccataccggatcatctgcaatcttctcattccatcgtttgaaccgattgtaatcggtgtcttcttttctgtagatcataaatggaccatgagcttcaatatctgcttcatctattaccatgaatccatacttgtcacacatttcatagaaaaatggtgcgttcggatagtggctggaacggatcgcattaaaattatgctgcttcattaacgtaagatcggttgtaatctgttccgaattgattgtaaatccagtaaccggatcagaatcatgtcgattgacaccacggaatttaatcttctgtccatttaaataaataacctggtctttaatctctatctttcttaatgcaatgtgatctacaattacttcattctctgtttcaagaatcagtttatatagatatggattttctgtattccaaagttccggacttgcgatttctaatacagctgttccttcttcagcaatacttcctagtgctacaactgctccgtttctatcttcaatcgaaatttttacatttaacggagagtagaatttcatttcaatttctactttcgcaagcatatcctcaattcttgttttaatatgataatcactgattgcctgttttgggcgtttcaaaatgtacacatcccggaaaataccactcatacggaatttgtcctgatcttccaaataggaaccatcacaccacttcatgaccagaaccgctatgctgttctctccgtcccgaaggaggtcggtgatatcaaactcactggtcatatgagaaacctggctataccctacataagagccattgatccatacataaaagcaactgtctaccccttcaaaattcaagaaagcttttggtgcattttcatctttgtgataaacaaaggtatgtgcatatgttccacatggaatatcctgtggtacatacggtggatcaaatgggaacggatacctgatatttgtatactgatgtgtgtcatatcctgccatctgccatacactcggaacctgaatctcatcaaaattttctgtatcataatctttctcaaagaagggttcctgaacatcatagatactgttaaaatactggaacttccaagttccgttcaataactgcattcggtctgactcttccctgtgctccaccaggttatccattctttttgatgccggaataaaataggctctggctggcattgtattttcatgcagtacgcttaaatcctcataataacgtggtacaatcataaataactctcctttaatacatatacatttttttgcactttgtttttccacagcaaaccttgtcttttacttttatgtttacgcttctctgttttgctatatatatcttatcctaatctgcaaaacatgtctatgaattggattagacaaaatatgcactaaatgatacaataacaaaaaaagaaaagaggtgctaccatatgtatatgaataccggttatttaaaccactcccatatggatttcaaagacaaaagtcgcccactggttgtaggaagttgcggtacttaccgcctttccagccatccaaagttaccaacctaccgtccaaggggacgcctggattatcagattatctatatcactgctggttgtgggcattttcattttgacaatatggataacgaaacgattgtccccgccggtaatattgtactgtacagaccgaaggaacttcagaaatatgaatattatggaaaagataagacagaagtatactggattcattttacaggcaacaatgtaaaaaatatcctacggcaatatggattcccggataaagagcgtgtatttcaggtcggaacctctatggaatacgaacagattttcaagcgtattatcatcgaacttcagcgttgccaagataattatgaggaaatgcttgtccttctgctccgtcatcttcttatcatctttcatcgggaactgaccagggaacatatctcgaaaaatgaatacctggatcacgagatggataacgcagttacctttttcagtgaaaattataaccagaatattagcatagatgattatgctgcctcacgtggaatgagtgtcagctggtttatccgaaacttcaaaaaatgcacaggttctacaccaatgcagtttattgtgggaatccgaattaacaatgcccagatgttacttgaaacaacaacctattccatcaatgaaatttctaaaatcgtcgggtatgataatcagctttatttcagccggcttttccacaagctgaaaggatattccccgagagagtaccgaaagataagaaacaagttctaaaatccacaatatcataaatccctaactggctgttaaaagttactcgtaactgttcagtaccttcacagttgcgagccgcaagcgcattagaatcagcttcgctgatgggcgcttgctcctacataatatacgttttcttacgaaatatgcggtaccgcatatttctgtactgaatagttacgattgatctatattatgatcaggcaatgcctgttgtaatgattaaatcgggctttccccgatgtggtatgcttcaactacctcctttcaaggtgcaagcagaaaaaaagcaccttaaccatattggctaaagtgcttgtatttgtttgctattaaattgttgtgagtcagacaaacttgaatttggaacgtgctttataaattttttccgatcccctcaagttcgttcatggaatccttgtttttttcaagttcatctctggctgttgcgtaatatgattttttgaaaagcatatcccatgaaagatattttgccatacagtcaaactgcttatcaatcaactcatactggatactgtctacgggagaaccgcctacaacaatcgtgccaacttttttattttttaactgcaatccacggcagtagcacttatcaatgataagtttcaattgtgctgacattccccaccaataaactggtgtagcaaaaagaatcatatctgcggcagcaattttatcaattgtaggatttgtatcatccttatcgacgcatcccttagagcattgacagacatcacatcccttgcatggtgcaatgttgagtttgtcaggttcaatgatttcaatttcattcttttctgatgctccttttataaatgcattgattgctgtcagcgtgtttccttttctggcacttccattaatgattacaattttcatgcgtgtatcctccaacttccgatttgtaaaacacattcttttttacataggcacagtataccacatttcctgtgcctatgctatatcatttaatgcttcttccgatatgaactcatcctctccacagaaacctccggatagaagtaagtaagaatcgttgctttcggaactcctgcagccaatgctttcttcacttcctctttctgctctacttcatcctgcatggagaatcttctgcttaattccgcatcaccaagcaccataaactgctcataggtaagagaatctatatacacattctcgcccttatccttcagtttttcataatacttttacaaactccactgcgttttttatatcttcttcatctggatgccctttggcaataccacccaccagtttaaatggaccaaatgtgtcatagcccttgcatccgaattttcctatcactttagaacgcttcttgtccaaaatctgttctatggatttgtaattcgcacttccaccataagtacagatcagaaatacctttttatcgtccggtagattcttctctgcaaattccaatatcgactgatgaaattttgaaaaatagattcctgatgcaaacccaactatatcataactactcagatctgcatctggctgttttacagcatcaatcaaatcaacttggcactcttctgctatgttttttactaatttttctgtatttccatgatgtacagatgcatatacgattgcttttctcatttattttcctttctgcctactccatcaccacaaatcgtattgtttcatagtctctgcatttcgatattcatgtttctcataatatcctatcaactttccctcatctctgagtgccaccatataaacatccttattctgtttctcattgtgaaaagtgtaaacgatattatggctttcatctactgcaaaccaatccactacctgctgtattctatcccttgattccggattatgacaatctaacaggcttcttccgataagtttatcgccacctcgcttcgcataactgataacagctgccggattcatgtaaataatctcatgtttaagattgcatataacaacggatgccctgtcctgatcaacaatactcttataaaagctgaccacatctatctttttatatatttttttcttcttacttttctccattttatgttgtccttaaaacttcactacttccggttcatgtgtaaatgatgaaaatgtagctatcacattttttaaatagaatacttctgtatttccatcatctgccgagtacatattctgtaaagatggataagcatcaagcatagactgtcttgcttctcttctgtcatcttctacaagttctccggctacacgaagccactcaccatttttaaatgcacagatttccacctttgggtttgcgtgaatctgttttgaaacctccttcacctttccggtctgaatatacagcttgccttcaaaaatatgtgctgttccaaaaggtcttacccttggctgatctccttccactgttgccaaataatatatttctgcttcttttaaaaaatttactactcgttccattgtataaacctcctgctattaaaatctatcaataatagaattataccattccatcgcttcttatgcactaatcaaccgtatcataaaacccctgtttcacatcattccagacgtaaaccaggggtttctcttatatcattctataccatagacagtacatatactatctattcacttttactctgtctcataaaagactttcttatccagagctttattctgatgtgcaacgattgttgtacatacggcatcacctgtgatattaacagctgttcttgtcatatcaaggatacggtcaatacccatgatcagaccgattgcctcaaccggaagtccgacagagttaaataccattgtcagtgtaaccagaccaacacttggtactccggctgttccgacagatgccagtgttgctgttccgataacggtaatatagtctgccatactcagatggattccgaatgcctgcgctgcaaacacaactgcaacaccctgcatgatggaagtaccatccatgttgattgttgctccaagcggaatcgtaaaggaagaaatcttcttggaaactccgactttcttagaaagtgtttcaatagaaagcgggattgtcgcatttgatgtcgctgtagagaatgcaaatgccataaccgggaagaatttcttgatgaagcggatcgggttcagtcctgtgaaaatctttaacagaatctgatatactcccagacactggatcgcaagtgccaaaagtactgcgatcatgtattttgccagcggaacaaatgcactgaatccgattgtagcaaaagtacggctgatcaggcagaatacaccgattggtgcaaggctcatgatcatcattgtcatttccatcataatgtcattgaactggctgaagaagttcgcaactgtctctgcacgttcacccatcttcgcaaggataacaccaatgatcagcgcaaatacgataacctgaagcattgttccacttgccagggaattgatcgggttgtccggaatgatatttaggattgtatctgtcagggaagttgcttccattgtctcaactgtggacgcacttgtcttgattgcactcatatcaagtccgatacccggattgatcagattaccaaccgataaagcaactgttacagcaagagctgttgttgcgaggtagaataccaatgttctgacacctactgttccgagcttcttcgtatctccgattgccatacttccgcacacaagggaacaaaatacaagcggtacaacaagcatcttcatcagacggatgaatccctgtccgatcacatagaggattccttctacaataatatcattttttaccttgctgtctggaatcagataacaaagtacaattccaaaaacagcacctaaaagcagagcaatgaaaatcttggtcgtcagaccaattttcttctctttcttttcatctttcacattcttatttttcattctaattctccgttctttctttcatatactcttctaatgactctttccaatccggcatatcatacatatcaataatacggagaatgaagttgtccaataccgcatacggtggtctgacagaagaaaggtctgactgttctgtcggaactgcctttaattcaacgtttttccctgacaatctcaagatctcctgagcaaattcgtaacgattgcagactccactgcaagttacatgataagtaccatattcattcgtactgatcagatacaggatcattcttgcgagatctttggcacttgtcggggaaccaaactgatctcctgctacagaaagtgtttttccctgttctgccacttcgagcacacggttaacaaagttatttccaccttttccgtaaacccagttactgcggataatgaaatgcttgtgtgtgaattctttcacataattctcaccagctcttttggatgctccataaacagtcagtggattcgtatcatcaaattctgtatacggtttcttgctctgtccgtcaaatacatcatctgttgaaagctggacgatctttgcgccattctttcttgcgacgatacttaagtttcttgctccaagtgcatttactcggtaagcatgttctggttctttttcgcacagatcggtgtctgtaacaccgcagcagttgataatcacatccggacggttcacaataccgaagttaagaacttcctctgtgtttgtaatatccagatcatccagatccgtattcagcacttcgatctctaatggatccagaatgtcgttcagcgctcggccgatctggccgtttgagccggctatccatactttaatcatctctcatttcctccttctcatgcaatgaaaaaggcgctgaatccaatcaacgcctctcatatactataaaataaacgtcaataatattttatcaacctactgtttccgtgtcaagattacacttttagtctatcaagaaaatatcatggttttcctgaatcttctctataatctcatggctgcttatcccttgaagttctacactgttctgactgacataaagaaacacaagaaacagaaaagtggacaggatcaatctggtagtaaagcttcctctgctattttctttcttatccagatcttctgctccatttcctgcactttgctccagaccatccggatataattcccgatataaacgaccatatcttggatgaattgccggtgttatcataccggtattccgctgtcgtctgcgattttcttcccacaatctacgcctacggacttctgattctttttcctgcacgaaagatcctctccatcttctttttttctagtttatgaaagtttcttctgctttattcttccaggaaaatctgatacagcgttttctaccggtcagccagttctcctgtaatgtcttcccaggtaatccctttttctaccatgagaaccattgcatgataaaggaaatcagataattcatacttcacttcctcgacatttggattttttgcagcgatcacaacttctgtcgcctcttctccaacctttttcaggatcttatccaaacctttttcaaaaagatagttcgtataggaaccttcttttggattctcttttctatccgcaattgtctgatatacggattcaaaaatctgaaccggattcttggcatcgtaatcatttccaacaattgttgtatagaaacaggagcggtttcccgtatggcatgctgctccgatctgttctaccttcgcaagcatcgtatctctgtcacagtcgattgcaagagatttcacatactggaaatgcccggatgtctcacctttgatccactggcattttctgcttctgctatagtaagtcatgcgcccggttttcacagtatgctcaaatgcttcctcgttcatatatgccatcattaagacttcatttgtcttataatcctgaacaatcactggaattaatccgtctgaattcaatttaaactcaccaaaatccatctggctttcaaaggaagtcatttgaattccattttctgcacaaacttctttaaatttgttaaagtccatatccagacgactgatgaatcttcctgatacaccttttacaccatcactctttaaaatattaaggatctcgttttcatccatcgtatccgtgacaacaacacactgcgtttctgtaacatttacaacagaattcagatccaggcgatgcataaatatcatctctgtactatatgcttcgatcagatgctgctgtttaaacaatgcatcgaaatcatttaatgatacagcgattctctcttttccaaaacgcttggatacttcctcgattaattcaatggaaagtgctttggagaaattcagcattgcacgttttgctccggcataaagaatcttcttcacatcttctgcacgtctgatgtttcctccgacaaccattggaatactgattgcacggttgatctgtttgaggaggttgatcgtctcatcatgttcttcatctgagtctgacagatcgaaaatgatcagttcatccgctcctctttcattgtagtggcgtgcaagttccatcacatcatctgcgatcacagttctgtcatcgaaccactgcaccgctttccctctttctataaaaatacaaggggtcagtcttttatacataatttcttcttactccttctgtcacgccgttaaaggcttccctttgtagaccatacttcttttattcttggctcttctgataccgccatatccagagcctttccgaatgctttaaataaagcctctgccatatgatgattattccctgcatcaaggatcttaaggtgcaggttcattgcagcactataggaaactgcatagaaaaattcacgcaccatctctgtatccattgttccaagcgccggtactgtaaaatctgcctgaaagttcagatacggtctgccggaaaggtcaactgctccaagagcaagaacctcatccattggcagtacaaaatatccgtatcgcttaattccggccttatctccaagtgcctgtgcgattgcctgtcccagtacgattcctgtatcttcgatcgtgtgatgggaatccacttcaagatccccacgcaccttaacatttaaatcaaataatccatgtcttgcaaatccatccagcatatgatcaaaaaacggaattcctgtatcaatctgattctttccctgtccatccagattgatcgtcagttcaatatctgtctcttttgtctttcttttgcagcttccgattctgttctgcatcacactcacagctccttttctcttatttttcaaatcttactttgattgaatttgcatgtgctgtcagatgttctgcctctgcaaatttctcgatatctgtgtggatcttctcaagtgcatttcttgagtaagaaataatgcttgattttttaataaaatcatctacagatagcggtgagaagaattttgctgttccgtttgtcggaaggacatggttcggtcctgcaaaataatctccgagcggctcactggaatattctccgatgaaaatagctccggcattacggatctttgtcatcacctcaaacggattcgctgtcacgatctcaagatgttcggaagcaatagaatttgctgcatcgattgcatcctccattgtctctgcaacgagaatatgtccataattatccagggatttctgaatgatctcgcctctggaaagctcttttacaaatgcatctgtctgtgcagatactttctctgcaagttccatacttgttgtaaccagaattgcagatgccatctcgtcatgctctgcctgagacagaagatctgctgccacgaaacgtggatttgccgtctcatcagcaagaacaaggatctcacttggtcctgcgattgagtcaatgcttacgaatccataaaccgctttcttagcaagagctacgtagatatttccaggtcctacgatcttatctaccttcggaatagactctgttccatatgcaagtgctgcaattgcctgagctccgccaaccttgtaaactttatctgcaccggcctcttttgccgcaaccagtgttgtcggagttacctttccatcttttcctggaggtgttaccatgatgatctcatctacacctgcaaccttcgccggcatgatattcataagtacagaagatgggtaagctgcttttccgccaggaacataaacaccgactctctggagtgctgtcactttctgtccaagaattgttccgtccggtttactgtcaaaccagctgtactgcatctgtttctggtgatagtctctgatattcacaagtgcttttctgataatagcgatcagttcatcatctacctgctcatatgcttctgcgatctcttcttccgttacaagaagatgctctgcgtccagtctgactccatcaaatttctctgtatattcaaatacagcctcgtctcccttttctttcaccgcattcaatattttctgaacacttgcttcaaacttcccatagttattcgggcttctctttaaaaggtcatccagaagattcttcttcgtattctcattcagtttctctatacgcatttgtctattcctccctcagaagatttcttaaatttgtgatcagctctttgattctgtcattttccattcgcatgctgaccggattgacgatcattcgcgctgacagcgggcacacttcttcaagtacgaccagtccgttttctttcaatgtagaaccggtttctacgatatctacgatgacttcagataagccaacaatcggtgcaagttcgatcgagccgtttaatttcacaatttctactgtctgatgtttcttgttgtagaaataatctttcgcgatattcggatatttcgttgccacacggatcagttcatgatgtttcagtttttctgctgcctcttcatatccacacacacacatcctgcattttccgaatccaagatccaggacttcatggactttacgtccctcctcgataatcgtatcttttccgacaactccaatatctgctgctccgtactctacataagtcggcacatccggtccttttgcgagaaagaatttcaatcccagttcttcatttacaaaaatcagctttctggaatccttatctttcatttcctcgcatgtgattccaagacgctccagcatctccagtgtcttctttgcaagtcttccctttgtaagggcaaatgttaaatatctcattgatctgctcctttattgctgctttgttttcttttttgtattgaccagcttctcttctcctgtctgaagattgatcacttcaatcttccggtcctctcttaagtaaagcatacttgcaacagaagaacgctttccatacgcttcaaaagtctctctttcatcccaggagtttctcttcatcatctcgacattttttccttttgcacgaaatgacctcgcaagagaaattgcccactgttccgttgcatccgtataaacaagcagattacggtgtcctgtctctactttgatcttctgacgatccagtgcactcataagttcatccagaatgattgcgaatccgatcgacggtgtcttctttccaaacttctcaagaaggtggtcgtaacgtcctccacgtacaactgcatctccggtaccataagtataggcacggaaaatgattcctgtataatatccataacttccactcatgctcagatcaaaagttacatgatcctctactccgtaaatcttcagcagatcataaatctggcgaagacgttctaccgcaagtcttgctgcttcacccggagcaatgcgtcctgcatctgcaagaatctccggtccacctgtcagttccggaagctgatggaacgcttctttcacctgatcggcaatctcataatgatcgagaatctcttccacaccaaagaagtttctgttcgcaatcaatgtacggatctcttctttttgttcgtcttccagattcgttgcctcgaaaagactctgaataaaatcaacatgtccgatacttacctggaattcctttagtccggttttcttaagtccgtccacaaccattgcgagcatttctgcatctgcctcgatagaatccacaccgatcagctctgcaccaagctgcgtattttctttcaggcgtccacgataactggaatgattgataaatgtatttccggcataacacagacgaattggaaaattctctgtctcaaacagtgttgctactgctcttgcaatggacggtgtaatatccgggcgcaacgccagaatattcccctctctatcaaagaatttataaagatctctaatcgatgtcgaaccgatttccttgcggaatacatcaaaatattcaaatgtcggtgtctgtatgtcctgatatccatataaatgcaatacagtattcagctttttctgcaatgccagcttaatggcacattctctattataaatatcccgaacgccttccggggtatgtaacttctgctccatgtctcgttcaccttcctgtcttttcttggtttttcactttagtgtgctaccacgttaaaacctgtttgtaattatacggactttgtaggattctgtcaatccctcgtttccaaatctttctgaattaaatccagatacggcacaaaatagccatttttcagttgaaaaaaccattcaggatctaattcttccagccggacactcttgcgtcccccactctgcgcgcggtcccagaacttacggatctgtgtatactgcatataataaagctcatttcttgctgtataatagatcagaaaaaaagcaatcccgccctgccgttcaaacttttccataaagtccatctgatgctcatgtacattctgaagtgggaaggtatctacattacactctttcgcatcaaaacagaccgggattccctgcactgctccgatatagtctaccgtacttgctttgtcgaaatacgcaagtgtgatctgtctgtggtctttatccatacgtaccggagtgatcggtgtcgggattttctgcatcagtgcaagtcccatctcactgtatctttcattcgaatgattgataaattcctccagtgtcgaacctctaagtcctctcgagttccatgttgccatctcacatcactccctgcgctttacagatttgttcaaataaggccgggacaggtgctttgatgatctttcctgaaagctgtttgatatctccctcgcagttctccgggaattccagacggtaagcatgcagaagctgggaacgaagtccgtattccttcttcaaagtatcgttaaatgaccggttcccatatttgtaatcccctgcgatcggatggccgatggatgccagatgtgcacggatctggtgtgtcttaccggtgatcagatgcacttcaagaagtgttgtttctctatttcgtgcaagcactttgtattcggtatcgatcgctgatgcttctttcccatcttttgtctgttcagccggctttttctgactcaccgtaactttatttgtcttttcattcttgacgagataaccatgaatcctctgattctcttttacctgcccttttaccagacaaagataatatttcttaagtgtacggtcacggaacatctcgcttaatccctgtaatgcctgcagtgtttttcctgctgccacgattccgcttgtatttctgtctaaacggttacagacagatggatgaaatgtatgcagttcttcttccgtgattttcccattttccaacagataatcaataaaatactccacaagagaagtatccgtcggggatgccttctgggagagcattccgaccggtttattgataaatacagcagcctcatcttcatataagatatctaactgtaccttctttcccgctgtctgttttcttgcagaggacgcttttttcttcgaaaactgtgaatgatcgataaagttctcaatcgtctcttccgcaagaaataacttaatcacatccccctgtttcagctgttcatttccaactgctttttttccattcagggtaatattcttttttctcatcatcttatagaaaaaactttttggcgctttattgagatactttgcaaggaatttatccatgcgctgtcctgcctcatttttctggatgctgatctctctcatcgtcttttcctctttacattgatatattcagaataagattacggatttcctgttctcttgctttcgtatcttcctgctctactacagcaatattttcaagtccctccacgcgggccagaaacggtgtatactgatttaagatcttaacagtaaaacctgtgtactgattctgcgcaaggattgtcttgatatgctttccaagttcatctgtatttactttctcataatgtgtgtatccgtaaatgttgtgtcccgaaattacgatacagtctgttggcatgatatgctctttgcttgtaattataagatcataacaaactgttaaatgttttgattttcctgcgatttccttcgcctgtgacagttcaattgattgatatggataacgtgcgatcacacctacaagtgcctttgatgccggaagacatccaaggatagcaacaactgtcagaagattcagcctcgtatgtgtctgccagtaaccaagagcaaaaattgccagaacgattgcaaaataaataaccgttcttaaaatctccacttttcttttataattcaaataacctggttttcctttttgtattttcttcatttttcatcctattctaaattcatatttgctgcatacgcacgagaaatccatgcggcagcagttttgttccaaagtaagttaatttcattgggattccataaacggagactgatttcccggatctgcagtccttcaacgcctgatgaaccactctgtctgccttcgccattgtcagttccttcaagatattctgcggtttcccggaaaacttgaaaaactctgtatcaaccggacccgggcagactgctgtgacgacaattcctttttttctcaattcttctcccaatgatctggagaagcttaagacataggacttcgttgccgcatatactgagaaatacggttgtgggcaaaatgcagatgcggacgcaagattgacgatcctgctgccagcacgcagaaatggcagacacagcaatgtcattcttgtaagagaccggcagtttacatccaccatatctgtctggatccggaatttttcagacaaaatctcttctacacttcctgacttgccaaatcctgctgaattcacaagcattcgtaaatccggctgttctttctcaagtgcatctctcaattccttatatacctttttcttctgaaggtcacccgcaaaaatccgaagaggaactctgctttctttcgcaagcgcttccagacgctctttgcgcctggcgatcacccagatctcatccagatttttataaaaatatccaagctgacgtacaaattctcttcccattcccgaagatgctccggttacgattgcaattttcatcctgcttcctttcttgaatcctgtctgtcagatacttaaatctacctattttctattcttcttagaatgaacatttctgatagatttcttcttatttttcccttcaactcttcctctgtattcagaattgttttgtcttttctgaccattcgaaccttttgatccttttttcggttcctttctgccggcttttttatcatttcctgaaccacgcatctgtctcggtctcacaagacatttcggtccgaatccgatcagatcagatcttcctgctttatgaagtgcttcaatcaccagatcatacagctctggattacgatattggatcaacgctctctgcattgccttctcatgcggactcttcggaacataaaccttctgcatcgttctcggatctaccccggtataatacatacaggtggaaagagttgatggtgtcggatagaaatcctgcacctgctccggcatatagccaagatcacgacagtactctgcaagttctaccgcttccttcagagtagaaccagggtgggaggacatcagatacggaaccagatactgttctttcccgattttctcattcatcttataaaactgtcttgtaaactcttcatagactttgtgctccggttttcccatcagagacaggacaggccctgccacatgctccggtgctaccttcaactgtccactgacatgatattcacacaactctcttaaaaactcctgcttcttatctgcgagcagataatcaaagcggattcctgaacggataaacaccttcttaacttttggaatatctctcaactttctcaacagactgacataatctctgtgatctgcgtccagattcttacacggggacgggaacagacactgacgcgttttacaaacgccatgctccatctgctttttgcaggatggatgccggaaatttgctgtcggaccgccaacatcatgaatatatcctttaaagtccttatcttttgtaatttcttttgcttcttcaatcagagattcatgacttcttacctggacaattcttccctgatggaacgtcaatgcgcaaaaactgcatcctccaaaacatcctctgttgctgatcagactgaatttaatctccttgattgcaggaactccgccttttgcctcgtaagacggatggtaagtcctctgataaggaagggagtaaacatcatccatctccatctgtgtcagtggtgttgccggcggattctgtactacatacagatgttcagaatacggttctacaagacgttttccgttaaatgcatccgtattcagatactgtgtgtaaaagctgcgggcataattcatcttgtccgctttgaggtcttcaaaggacggaaggatttccgcatcataaatactgtctaatgatttcgtttttacaaccgtaccggctatatacgtgatatcctcaaccggtatcccggcatccagtgcttctgcaagctctacgattgaatgttcgcccattccataagaaatcacatctgcacccgaatcgagcagtacagaacgtttcagcttgtctgaccagtaatcatagtgtgccattcttcgaagacttgcttcgataccgcccagaatgatcggtgtctttttataagtctgacgaatcagatttccatatactacgcaggcatagtccggtcgttttcccatctcgccgcccggtgtataggcgtctgtctttcttctctttttggatacagaataatgatttaccatagaatccatatttcctgcagagacaagaaatccaagtcttggttctccgaacacctgcacgctctccggcttacgccagtccggctgtgcaataatcccaacacgatatcctctggattccagaagacgtgtaatgattgcgtgaccaaaagatggatgatcgacataggcatctcctgatacatagacaaaatctacctgatcccatcctctctctttcatctcttctctggtaattggtaaaaaatttcctttcatgctttctccctgtttaacgtaataatgaacagtcacgcaatgcttccagttcctgtcctgttaattctcgatattctcctaatgcaagccgcggatcaagtacaaggcttcccatctgcaggcgtttcagataaataacctcttttccgactacatggaacattcgtttcacctgatgaaactttccctctctgattgtcagtcggatttcagaaatctcttcacttttcagaatttccagatgagccggaagtgtcggtctctcttccccgatttcaagtccttctgcaaatcttctcacatcttcttccgtaacttttccatcgattctggcgaaatagactttatctacatgcttcttcggtgacaaaagctgatgtgcgagttcgccatcatttgtgatcagtaaaagtccctctgtgtctttatctaatcttccgacaggaaagagatcctttctctgcttttcatcaatcaaatctaatacagtactgtcgtttttatcttccgttgcagaaaccaccccggctggcttatttaacatgtaatattcatattctgcataagcaaccatctgtccctggtaaaacacatgatctttttctgtgtcaatcttgatttccggacgttttaccgtctcttcattaactcgaacctgtccttttgtgattgctttcttcacttctgtacgtgttccgattcccatgtctgccagatatttatccagtctcagtttcatgagttccaccgccatcccggaaggtacttattcttaagcatctgattcacaagctttccaaaaccaagcggatatccatccacacagatcagataccatcccttgtctttcggcttcacaagatcctccacatccaaagtctcgcctttcagatatttcataacgcgttcgtcttctaatggaagatcgatcacctgatcatattcttcctttttcagattcatcgccagtgcctgactcggctcaaaacgattcttcttcagttcacccatcagtaggcctgttcttaagaaacggattccacgaagtgtcggaagtccttccggcatataatacactttctctccacgcagatccatgcgagaggaatcgaattttcgatcaatatgaccaagaaattcttccagttcttccggaagcttcttgttcttcccactctccggaagtctctttccttcttcctgtttttcacccttttgaagaagtgcgaggaaatgtccttctcccttcatacgatgagggaaaatacgaaccgtcttttcaagttccggattcttgctttctgtcacctgcggcattccatctgcaaatccttcgtaaccttccatctcacagatcttaaattccgggtattcctgaagcagatattcaatcgtctgttcattctcttccggtgaaaatgtacaggtggaataaagcagcattccacccgggcgcagcatctgggctgcctgtgtcacaatgcttctctggatctttgaaaaaaactccggtccatgttcttcccatgctttcaccatctttttctctttacggaacatgccttccccggaacaaggtgcgtcgatcaaaatcttatcaaaatactctgggaaataagaaacaagctttccaggctcttcacttaagatgagcacgtttccgattccaaataattcaagattcttcaaaagccccttcgctctggaactgctcagatcattcgcagccagtacaccggttcctccaagctttgccccaagttctgtggccttgcctccaggtgctgcacagacatcaagcacacggtctccctgctctaccggaagacgatctgccggtgtcatggcacttggctcctgcagataataaagtcctgcgaaataatatggatgtttcgacggctggatattatctccgtcataatagaatccattatggatccacggaaccggctctaacggccaaggtgcgatcttcaggaaatcttccacagaaatcttcgctgtgttcacgcgcagaccatagtgacgcggttcatcataacatgccgtatatgcttcatattcagaaccaagaagatccttcattttctcttcaaatacttttggtaaattcatatttattgtttgctcctttgcgatatcaagatcaaaatactttacatttaactatatcatatttccatagctccggtatagtttcttttttcttttcatagaatatttttgtaaaaggaggtttcctatgcttctggctctcatactgctttcactgttttttacgatgctactctttcctgaaactgtatttcagggagcttgtgatggcctgcttctctggtatcagattctgataccgaccctttttccttatcttattgtcacaggacttttgttgaaaacagatggtgctgctgttgtctcccgtctgcttttccgtcctttccatctgctctttggaacttccttctatggaagtttcgccgttctgtccggctttttatgcggttatccaatgggtgcaaaaatcattgccgaccttcttcttcaaggaaaaatttctcttgaagaagcttcttacctgctgtccttctgtaataatgcaagtccatctttcattattacttttcttgttttaaatacaattcatcagaaagctttctgcattcccgctttactgcttcttttcggaactatgatcctcttaagctttcttcaacgaattctaagacatttcatcaagaataaagattggattttcccggaaatgtccgaagttttcacacaggaaaattccattttttcaaaaccactaacgcacaaaatgaatttttccgtgttagaatcctgtatcctgaacagttcagaaacgcttgtaaaagtcggaggttacctgatgatcttttctgtacttcttgcattattggaacttctgccgattcgttcacctggttttcttctcttgaaatcttctcttgagatgacaaacggaattcttctcctgtctcaaagtctttcccacccccaggttctttatccgttgcttctcgcacttacctcttttggtggatggtgttccgttgcccagacacaatccatgattgccggtacaggacttaaactttcttcttatataatacaaaaactgaccgccgcactggcagtcagtcttttgacatttctctatctgaaatttttataatacaatgtaatgactacctcaggtctccctgtccattctcatcataatatccgtcatcggatggaacttcaagttctgaacggttagagcgaactgtatcgtagcactcctgtaaagaattgatcaatccgtcatactttgttgtataactgtccaaagtatgtccgataatgctttctgcatttgcaagaagatcatctgtatactggattgcaccaacacggattgtatttgcatccattgttgcgttatcaagaatctcctgcgcctgtgctgttgcctgagttacgatctcatttgcctgagcatatgcctgctgcatgatctcatgctcactaacaagctctgttgtctgaacctgggcttcctcgatcattgcatctgcttttgcctttgcatcagcaagaatcgcatctctgttcgcaataatcttctgataacgtttgatctcatccggtgtcttcatacgaagttcgcgaagtaattcatccagatgttccttatttacaataatctttgttgtagacaacggctgaaacttacaatctctgtctatatattcttcaatttcttcaatgatctgttcaatacggctgctcattgttacactctccttttttctttcatcttttctctgagtgcgatctcgacggcttccggcacaaactgtgatacgtctcccccaaaagcggcaatctcccgcactgtagtcgaacttaagtaagaatattctatacttgttgtcagaaacatggtctctatatcaggcttcatcctctgattcgtctgcgacatctgcagctcatattcaaaatcggtaatcgcacgtaatcccctgataaccacatctgcacctatctgttccgcaaagtctaccagcaatccatcaaatggtataatctcaacattcggcagatctttcgtcacttcctttaacattttaacacgttcttctacagaaaacaacggcatttttgctttattattcagtactccgacaattaatttgtctacgattttacaagatctgcaaatgatatcataatgtccacgggtaacggggtcaaaacttcccggataaattgcttttaacatacttcttcctttccggctttctcaataaatacatgcttgtttgtcttatatctcttctctttgatcaaagaatatcccaattctggaagatatccaaaatctgtatctaacgaagcttctacgatgatcaccgtatcttcatagatcagatccgatcctgcaaggtattccagaactcttttctcaaatcccatattatacggtggatccatgaatacaaagtcaaaaaccttttcaccttccaactgatataatgcgttcatcacatcctttgtcagtgtaagtcccttcttctccagacgtgtgaatttcaaattctccttgacacattccatcgccttaggatttttctctacaaatactgcttcttttgctcccctgctgagagcctctattccgattccgccacttcctgcaaacaaatcaaggaaaatacagtcatacatctgcggacttatcatattaaacaaagtctctttgatccgatccgttgtcggtcttgtctctatcccctcaagagtcttcagttttaggcttcttgcgcttcctgcgattactctcaaatatcgacacctcctgtcattaactatggtgaattttagcagaaaaaagcacccgggtcaatgccgagtgcttttctctttttcatttcttgtgttctttttactgtacatgacagtttttgaaccgcttttctgtctgatgcagaccgcttctgcagacgatttttcttcgcctgttacttttctgccatctgcttctcctgctgttcaatcatctttttaaccatataaccgccgacagaaccattctgttttgatgtgaggtctccattgtagccgtctgttaacggaactcccaactcggatgctacttcgtacttgaacttgttcatagctcctttcgcctcaggtactgctgttttgttagatgaacgacttgccatgatctttttcctccttttgcattttgtaactttactatttagctttgttacgctgttagtatgtggaggaaaattaattttaaactggtaacttctggcaatcactgatgcagccggattgctccattgctatacatttgctgtaatccgcaaacatcacaatgttgtttccagcatgatctcatccagttttatccgtaaatgttctttcaatttgcgatgctcagggaattccagttccggatcgtccaaaagaagtctgtctgcctcttcacttgcgttttgaagcagctttgcatcttgaaatacatcggcaactttaaaatcaagcacgccactctgccggattccaaaaagatcccccgggccacgcagtcggagatcttcacttgcaataaagaaaccgtcatttgaatgattcaggatatctaaccgttccttcgtttcttttgatttcgatgctgtcatgaaaatgcaataggactgatactttccacgaccaacccttcctctcaactgatgaagctgcgccagcccgaaacgttctgcattttcgatcatgattactgtcgcattcggcacatcaattcccacttcaacaactgttgttgaaacaagcacctggatttcatttcttccaaatgcattcatcacttcatctttctctttttccttcatctttccatgcagaaagctgacattgattgaatctcccaacgtttctgaaagcatctcgcaataatcgataacattttccgcttccattgcttcactttcttcaaccattggacagatcacatagcactgacgtccttgtgccacctgttttcttatgaattcataggccttcggacggtatcctgtatccacaacacagtttttgatcggaagacggttcttcgggagctcatcgatcacagaaatatccagatcaccataaagaataattccgagtgttctcggaatcggtgtcgcactcattacgagaatgtgtggcaggtttcctttacctgcaagcatttctctttgttttacgccaaaacgatgctgttcatccgtcaccacaagtgccagattgtgatagattgctttctcctgtatcaatgcgtgtgttcctataataattgacgattccccactctcaatccgggcataagcttctctcttttcttttgctttcatagatccggtcaaaagttctgcccgcagtgggatctgatactgttccaacatgtctttgatattttcaaaatgctgtcttgcaagtacctctgtcggtgccattaacgctccctgatagccgttcaatcctgcaaacagtaatccaagaactgccacgattgttttacctgatccaacatccccctgaacaagtctggacatgacatattgacttttcatgtctttctgcatatcatcccatacccgcagctgtgcagccgtcagttcatacggcagttgtctcaggaattcgctgatttgaggctgatcttcaaaatggaatccgttcttcatcctgtcctgtgtatttttaatctggcgcagagaaagaataaaaacaagaaattcctcaaaaacaaatcgttgtcttgccgcaagaaatgcttctttattctccgggaaatgcatctcccgcacagattgttcataaggccggaaatgatatttcttcgtaaattcatccggaagaaagtcatcctgttcccgcacctgttctaatgcctgacgtagtgctttgattactgcattgtttgtcagacctgctgtcaatccataaacaggctgcatggtgttgattttttcctgataacggactgccggatcgtaaatctccggatgttccatcacaagggaatctcttttcttcacaaccctgccgcgaagaacaactgctccttttcgcccaagtgtatttcttaaaaacggcattcgaaaccagattacctttattgttcctgtcagatcctttaaatatgcagtcgtgatctgtcttccttttcccggagaaacctgtacacgcccaaaaacactgccgcagatcgtgcagactttgccttcctccacttcactgatcggaaccggttctccaaaaatctcataccctctcggataataatgaatcaggtcatccactgtgtaaactccgattttttcgaagagcttctccgttttttcgcccacacctttgattgttccaactcctgcttttttactcatttatgtctgtctcctaaacaaaataaccggaacacttttcccaaatgtcccggtctgttcctgattttaatacagtactgctgttctgtctctttactgacagttctccttattcaacagaaagtacataatagtagattggctgtccgccggaatgtacatcaacatctacatccggatataaatcttcaatctcctgtgcaaagttctctgcactctcctcctgtacatcctgaccataatacaggctgatcagctctgtgtcttcatccaccagctgtgcaagcatctcttttgttgtctcttccacagactgtccgacagcaagaattccactgtctccgattcccatgatatctccctcatggatctctttgtcatcaatgtgtgtatcacggactgcataagtaacctgtcctgtcttcacatttccaattccttcgatcattgcttccagattcgtctgtgcgtctgcatccggcatatagttaataatcgcagtaattccctgcggaactgtcttggaaggtactacaataatatccttatcctctgtcagtgtctgtgcctgattagcagcaagaataatgttcttgttgttcggaaggataaagatatgttctgcgttcacctgatcgatcgcattgagcatgtcttctgtacttggattcattgtctgaccgccttcgataatgtagtcagctccaagctcacggaaaatctcattcattccttctccgatagaaactgcaataaatccgacttctttgcgcggctccgcctttttcgcttcagcctgctgtgcagccagcttctccgcatctttgatcaatctctcctgatgctcttctctcatattatcaatcttcatacgtgagagctgtccgtatgtcagcgctctctggattgcaagtcccggatcattcgtgtgtacgtggatcttaacaatatcatcatccgctacacatacgatagaatctccgatagactccagatatgctttgaactctgtctcatctttcgctgtgaattctttttccagcatgatgataaactctgtacaatatccgaatttaatctctgtttctgcctgttcagaaggcttcaccatctttgtgccggcacttgcctcgattgcagaataatcaatctcttttccctggaatgcatcgtatgcaccacgcatcacttccagaagtccctgtccaccggaatctactacgcctgcttcttttaataccggaagcatctccggtgtcttttcaaggacttcctgtgcatagttgatcacttctgaaataaatgtatccagatcttctgttgtctctgcaagctctgccgccttctgggatgctccctttgctacagtaagaattgttccttccttcggcttcataacagccttataagcagttgcagttgcacgttcacatgccttcgcaagtgtaattgtgtcaatctctttatgttccctgatctcctttgtaaagccacgaagaagctgggacaagataactccggagttacctcttgctccacgaagagagcctgaagaaattgcttttgcaatcgccaccatatcaggattctccagcgcctttacttcttttgccgctgacaagatcgtcagtgtcatatttgttcctgtatcaccatccggcaccggaaatacgttcaattcattaatgaactccttctttgcctcaagattcgctgctcccgcaagaaacatcttctgaagcaattcggtgtttatcgttttaacagccacaattgttcctccttaatctatcactctgacaccttcaacgaagatgttgatcttatctactttcataccagtaaattcttctaccttatattttacattattcataaggttgtcagaaactgaaagaatattcactccataggaaacgatcacatgaaaatcaagcgtaattacattatcttctgtgatctcaacatgaattccccttgtcaggctttctcttttcaaaagatgcacaaggccatctttcatattaactgctgccattcctactatgccaaagcactcaattgccatcgagcctgcatattttgcaatgacttcaggattgattgtaatgattccaagatctgtactcatacttcccttcatcatatattccctccaattctataggttctttccatatataacatgactattatactattactttttgttttttacaatacagttttgatttttttaaaataacacttgcattactcgaaagtttctgatagaatatcattgttatgagtctaaaagaccagtttagattgttaggaggtgcagtcatggctaaatgtgctatttgtgaaaagggtgctcattttggaaacaatgtaagccactctcatagaagatcaccaaaaatgtggaaatcaaatgtgaagtctgtaagagttaagacagagggcggttctcagaaaatgtacgtttgtacttcttgcctgagatcaggactcgttgagcgtgcttaattctcgtttgatgattcaatatgacacggtataaagaactttatctgtttattcggataaagttctttttttatctgcagaacaaacaatatgccagtacgataccggtaattgcgatcacagttccccataagacatcagaaagcagcatcatgacgatcattcctgctgcaaaccaaaacaatgcaaatccaaaaactttcttcacaatactgctcccaatattttctatattctagtaactattttattcttcatccagaatatctgctacatcttcttctgttaatttttcatcttttgatgtaaaacggtctaccacatcaggtaccatatccaaaagttttgtaattgtatcctgattcttgatattcacaagtttcgtctttccatcctgaataacgatcacagcactcggtgtgatctttccaccgattccaccgcctgctctgtctttcttttcagcgttaaaagaacctgctccaataccaaaagaaacatctaccagcggaagaatgattgttccattgatatggatcgcatctccgacaactgtctttgatgaaacaacgctgtccattccctgaaagagtgattctactgtttctttaaatttgtttccgtctgccataatcctgactcctctcattttatatattttctaatgtgtttgtaggtaatcttcacatctttattccagaatagcttccatgcaggaacagcaaagtaaataacccgaatcttcccttctgcagatgcatttccctccagctttcgttcttcaaaatccggctggatctgaacatactcaccaatcagtccgtaaatactccccagaaaagctaacatatatcctgtccaggaaggatcactgaatccaaatgtaacattcacctgaagctttttaggcttcagaacatgtaacagatggcatagttctttcttcactgcctcgaatgcccgttgatgtttctcataagttaaaaaagcggtcagaaattcttttttctctcctgctttttttatagtaccacagagtttctgaaatgtatatttgatttttttcaatttagattccgtctgtacgttttcgggcctgcgctcctctcgaactttcgtcttttctgtctctgactctttttttatctctggctctttttctaatgctttctcaattttcacatctttttccggtggattattctttacttccgtcttcttaccttccaaaggttctttttccaacggctcaggaaccaccggcttctctgacgtttccttttgttccttttccgaactgtcaaatttcttccaggcaagacgaagcttccattttaattctccatgttcataagacgctgatccggaaatcagatgaaacagccaactgacctttccatatgccacaagggtatcaagtgtattctccccttttgcagaaaatctgtatttcaccggataaaacaagattgttaaaatcagtaagagtaaaattacgagcaaaaaaagaagaatacatccaattattttcagtataagaaacaggatatgtatcatacgcttcgaatctcctttttctcaaactcttcctgacgatccaaaaggaactttctcaaatttacctctcccgtcttctcatatgcttcttccgcaatcctttcgatcagactcaatgcgccatcatacccattcgcaattccaacaataaataaggatgcattatcaaatatatgttgctttaaaagaagcgacgaataatattctaaatggttctgctttccctgtgaaagcgtaattacatagacagaaggctgcagtttatttttctgcaatttttttattaatttcagttttttcttttcccagccttcgctgacatataaatcacagaaaaattttgtctgcatcttttctcctcccattagttgtaataggcgtctaaaatatccccggcgattgccactgcttttccgctggaacttccatccgaaccttctgtgatcacactgattaccagatccggattatccacatttgtaaatcccataaaccaggaatgtgtcttttctccatctgacatactgtactctgctgttcccgtttttcctgcagcagtataggatcttccttttaagacagatcctgttccttcctctacaacagctgtcatatattctttcaattgtgcagcttcatccgatgtcatgaccttcttataacttttcggaacattctttcgtatctgggaacccgtataattcgtcacactttccacaagatatggctgcatcatggttccaccgttcgccactgcctcggcaatcagtgccatatgatatggacttacggttgtctttccctgtcccattgccgtcatcattacttctccctcactggaattctgatccagtgcaaaggagctcttcgctgtattcagtacacccggaagcgatttattgaacaataaatcttccgccgtctgacggtattgcgtcagatccaggccaagaccaatattggcaaaagatgaattacaggaatttgcaaaggaacttctcagatcctctgagccatgtgcatttccattaaagcagtgaattgtaatatctccctgtgaaatctctccattacaatcatatgtataattcggataatcactgttctgacgcataaaagcaagtgttgtaaccactttaaacgtcgatcccggagcataagatccttgtgtcacacgattcaacagcggactgttttcttcatctgaattcaattctgaccagtcacttaaaatattattcggatcatatgccggtttggaaaccatggcgagaatctttcccgtactcgcctccattacgattgccgcacctttgtttgatccaagcgcatcataagccgcctgctgcagatttgcatccaatgttgttacaactgtatctcctcgattcttcttttcactgaattcattctgcaatttttcaagaaagaatgcatttgatgtcagaagctcaaaattctctaccgattccagacccgtagttccaagcttggaattactgtatccgatcgcatgagcaaacacttctccataaggatactctctcgtctctgatccatcatccccaacgactgtctgtgcaagcacatttccattcttatcaataatgcttcctcgtataatcgtatctgcataagcatcctgtctttgattatatggactgttcactacaagttttgcccgcacgaccataaaatatacaagatatcccatcaacgcgataaagagaatcacgaaaaagtaagtgactctagcgaactctttgttccgaacgcgttctccgctgtctttgctgccgctgttccgggacatcctcgaatctcggtctgctttttgttgttttcttaccggtcgttcttcccgattcatttcttaaatccctttctctttgtcttgctctgtctctgttatctccatcatattctcttcgtctgtcacgtccatcctgacgggatcttcctgattttgcattcgaactgctctggcggtgtctttcattctgcctgctgcggtttctctgtcttgcgcgctgcatctcaatctgatgctcttcttctgcttcttcatcttctctgacaatgtagagcccctgaataatcccaaacatgatcatcgtacttaacagagaacttccaccataactgacgaatggaagtgttactccggttaacggaatgaactttgtcactcctccgatctgcagaaatacctgaaaaatatagcaggttcccagaccaagtgctactaatttatagaagaaattacgcaattccatcgcaatattcaaaaacatcacataacagctgacgcatacaaggatcagacacagtgtaaaaatcagtcccatttcttctgtcattgcagagaagatcagatccgtctctgccactggaatcgtatccggctgaccacggaataatcctgttccaaaccagccgccacttccaatcgcaaacaacgactgggcgatctgatatcccccttcgctataagctgcaaacggatcctgccatgccgcaactctgatcttaatgtgggaaaacagatgatatccaaccactgcagctccacaccctgctgccacacctgcaattgcatataacggctgccttgtcgcaacatatagcataatcagatacacaataaagaagattaatgcagctcccagatctgttgacaatacaaggatcagaacatgtgctgccgctatcgcagtcgtaacaacaacattcttaaattctgtcgatttattcaggcttgctgctacaaaaaatacaaacagaatcttaacaaactcagaaggctgcagactcacaggtccaatattgaaactcagctttgctcctccaagtgttgctgcaaacaatgcaacgataagaagtgctactcctccaactgctgcatagatataagtccagttctccaggaaagtcatcttccggatcagaaccggaacaataagaccaaaaacaataccaacaacaacaaataccagctgacggattgcaattccataaggagacttactctgtgcggaaagccttgtgatcatgatcattcccgctgtgatcaacatacacatattattgacaaccagtctcgaaacattcgggtagatcagattgtataataagatgactgccatcacaatcactgccagtgcaccatatatgaacatcatcctcagatcctgcgttgcaaaatacattgcaataaatgcagtgatctgtatcataaatagaagtacatcctgacggatcaatactttgttttcctcatcttcataacttctcgtaaagattgaaaaacaggaaaaagtatatgccgccatcaagatgataataaggtattttgatacctgaataataatattagccatatttcacctgcttcaaataattcctctgttgaaatgtcctgttgtaaaatctgtatcttcttttcctctggcaacagttttttcatctgttaagaaaaatgtattcagaactgtttctgtctgttctttatcctccagagtaaactggatacggcgcatctttggatacaattcattcactctgtcccattcctgtcttagattgatcggattttccgtataaatcacattataacagagatcacaatagttacgcgcaaagaatttttcgtctcttctgtcttgaagcactcgtactcccggtttcttagaacagcctgaagttgttctctcaatacactgtgcagataccataaccggaattcttccgtaaacaagaagttcaccgtctctgatatcaagttctcttagttctctgctgttaagctccaacggagctgtaaaatcctcaactttttgctgcttccaaaattctttgccatactgattaaagatatatagattatggtctaatataatctttttgtcaaatcctctttcttttaagaaaaagaaagcttcaaaatttcgaataacaacgccgtcaattggcaattgattaaagttttcaaattgtcttccaaaccattcctgcgcattctctctgaaaatatgtggaaataccagatacaattcaactccgctttttctccaaaaatcaatcctgtctctgacatgtgtgtctgaaaaacctgtgccaaacaaccggaaatctaatgcaatccggccaatcctttgagttccctgtccataaagttcctctttctgattcaaaaagctgaacacggtctctaactgttcctctgtttcaataaacacagaatatctgttcagatttccatttcctgtctcttctttaaatgtttctacctgtgtcgttgaagggttgcattccctgtaaaaagcagttgcgatctctcttctcaatccatccagtgctgctcttcttaaactattcagctgctgcatcggaagaaatgcatcctgatccatagatatttccagatctttcaggaaaaatagcgtaccgcctgtcttcgcaagctgtgtgcgaattctctcttcctccaatgggcgcttctgtgcacgttcaactgcatgttctgtatatgctgtataagaaaattccctgcagcagaccgtaaaagatgccggatatccaacctgaaggctcaaaaatccataaatatcctcctgccggtcttctttcctgtatttctgatccaaactctcaatcagttcttcatttcggattcttctaaaaacaaagccttctttaaaacgcatccccttcggcacaagaaaacgtaacttttctccctttgtgatcttcttgccaagtgtataattatctttcccgctaccgatttcaaggacatcatgtgcatgcagatctgtcaaagcctgagctgtgacctcacgtccattttgcgacagacatctggctgctgctactccggcatgattcggacgatccagtgccagcatttctcttccattatgctgcttataatatccggtatctgaatcaccgcgattataaagatccatcaggttttcgcggtcttccggtttcaccgcataaccgcttttcccttttctcaaatataaatccacatatttccgatacatagctgttactgctgccacatattccggtttcttcatgcgtccttctatcttaaatgagtcaatcccggcttcaaccagttccggaattaattccaacgtacagatatccttcaggctaagaaaatatttcttctgaccatctactgtataaggaagtctgcatggctgtgcacattgaccacgatttccacttcggccgccgatcacactactcatcagacactgtccggagtaacaatagcaaagtgctccatgaacaaaacactctacttcaaggtccgttgtttcatgaatctgtcgaacttcttccaacgaaagctctcttgccgggacaactcttgccgccccctgactctctaaaaactttgctcctgccgcaccagtgattgtcatctgtgtactcgcatggatatcaagatccggaaaattgcttctgataaattggaatacacccgtatcctgaacgatcaccgcatccaaacctttctcatataatggtgccagataatcatacagttctgcaatctcatgatcttttaataatgtatttactgtaagataaaacttcttcccataaatatgagcacgctcaattgcttcgatcagttcatcctgtgtaaaattgtttgcatatgctcttgctccaaaacgtgctcctgccgcataaacggcatctgcacctgcattcattgctgcctgaaaacatgcaaaggatcccgccggagccagaatctccacctgtcggtcttttctcattcttctgtcattatccttctctttattattatgttcacataatctatgagaaacacgctccgcgagtttctcaagttatcgcgacaatcgccaaggtcttgtgcaagtacggactttggctcgttgttcgcgtaaatgaaaaaggctgccaaagtgacagcttttctcatttaccttcttcggtttttcatctctgtctcgagcttaacaatctgcatctgaaggtcattattctcttctttcatctttgcaagctctttctcagcattctcaagtttgatctgggctgaaatcaattcatgcttcagatcatacatctctttatccttgagctcgatatcgctttccagggaatctccctgtttctttgctttaaaataatcatctgcaatattaagtgcaagaaggacattccttgtgtctgcactctgttttctgtatccttcactgttcgtacattctgtgattttatgattaagataggaagatactttctgcagatactcttctccttcaaagccactgagagtatagacttttcctccgattaatacttctgtaaaatgttttgctgaactcatagcttcctcctcgagtttctattcttctattatagactatttatcctcaaaaaccaactattttttcagaatttctatacttctctcggaattccaagatgttggtaagctaattctgttacaacacgacctcttggagtcctctgaatgaatccatttttcaacaaatacggttcgtaaacatcttctaatgtgcctgcatcttctgaaatcgatgcggcaagtgtctcaagtcctaccggtcctccctggaacttctcaatcattgtgatcagaatgttacgatcaatatgatctaatccgaatttatccacgtcaagaagatctaatgcataatttgctacttcttttgtgatcacaccatcatatttaacctgtgcaaagtcacgcactcttttcagcagacggttcgcaagtcgcggtgttccccttgatcttctggcaagttccatagcaccttcttcttcaatctctacacctagaacatgtgcagaacgcagaatgattgtcttcaactcttcttcattatataactccaaatgatgcactacaccaaaacggtctctgagcggtgctgtaagcattcctgctcttgttgttgccccaaccagtgtaaatttgggaagattcagacgaacagaccttgctcccggtccctttccgatcataatgtcgatcgcataatcttccattgccgggtaaagcacttcttccacctgacggttaagtctgtgaatctcatccacgaataatacgtcatgttcctgcagaccattcagaattgcagccatctcgcctggtttctctattgccggtcctgaagtaatcttcatatttacacccatctcattcgctatgattcctgccagtgttgtcttaccaagccccggcggtccgtaaaacagcacatgatccagtgcttcgccccttgctttcgctgcttctatataaatactaagtgtcttctttgctttctcctgtccgatatattctgataaaagctgcggccttaactgtccctctatcttactgtcttcttccagattctctgtcgttataattctcttcgccataaccgacctctcatttcataactctttacttcaaattttgtaactgttcagagcagattctttaacgcttctctcaaaagatcttctacactcgcacaatcaacagataccttcttcactgcacgtaaactctctgcacttccataaccaagtgctgtcagtgcctgtaccgcttccgcctgcattccggtatctgtcgcctcaatttcttttgactgttcactgccatgtgctgcctgttccagaacatcctcaatgctcatcttatctttcaactccagaatcagcttttccgcggtcttctttccaattccaggagctgatgaaattgtttttacatctccggccagcacggcaaaacgaagttcatccggagaaaggcaggaaagaatattcaacccggctttcggtccgatcccgctgacaccgatcaacagtctgaaaacctgaagatcttcgcctgttagaaatccatataattgcattgcatcctcacgcacgttgagatatgtatgaattttcacttcttccccaactgccggaagcatggataatgtctgctgcgacatataaattccgtatccgattccacccgcttccacaatcgctttctgctcctggactgctgccagttcacctctaatatatgatatcatcttcctctatccttttcccgctgcaccaaaaccgcaacgcttccataataattataccagagaaattccctggatcctttttaaaacttcttttgccacaagtccgatcagcagcccggtcacttctcctgccactaacaaaaccggcagataataccccacctgatatgtctgtacaacaaccattgcaacaagaagctgcccgatattatgtgctgtacctccaccaatactgactccggcaacactgaacctgtctgatttcttaaggagaaccataacaaggaaactcaaaagtcctcctgataaactatatagaataccaaacagatttccgaacatgaagcccgataaaataatccttgtcacggaaagtgccagtgcctcttttatccccatcttgtacagaacaagaactgtcataagattcgccagaccaagttttgctcccggtattccgaaattaatcggaatcaaaagttccacatagctaaaaatcaatgccaatgctgtaaatacgccaaatatcgctacttttctaccgtgcaatctcatccacctccggttcctctccgccacggatcgttactatagtctgattcggcaagcagattatactttccccatctcttgaaattgctctgtggtttacacaaatctgatccggacagtcagcatcttccatacgaacctttctgtcctttatgagtactttattcttatcatttacatcaatttcctgatcctgttccaagcggtatcttccatacaactcgccatttacctgaatctctacttcactgtattcatctgtagtttttaaaagctgtaaaccaatcgttaaaacagctacaaaaaaaatagctgctgcaagtatccagtcattcttcttcattccgcaccatctttcttccataatggttttgctaattcatcatagcacaaccatattttgaatgcaaccacatgttcgattgtatttttattcaaacctcgttataataaacacatcattcatttatattaagaacggagattttatgaaacacaaaaaaatactggcttgtttccttacattttcttttctgctgaccggatgttccacaaaagatcagtcacagtcgctttctatgacaggaacctatttcgacaccgttgttaagattgaagtttggggagcagattctaagatcatggatggctgcaaagatatctgtgagaaatatgaacaactcttaagtcctacgatcgattccagtgaaatcagtcagatcaatcaggcacaaggtgcctccgtttctgtatcgaaagaaactgctgatttaattgaactgggaaaatattatggggatctttccggcggaaaatttgatatcacaatcgcttctgccagtgatctttggaattttcacgataatgcagatcatagcatccctgacgcagggcagctggctgaagctgttactcatatcaattataaaaatatagaagtcaacggaacaacggtaaccatgtcagatccttatgcaaagattgatctgggtggtatcgccaaaggctatattgcagatcaggtaaagaattatcttgtagaagaaggaatagaacatgcctatatcaatctcggtggtaacatactgacactcggtggaaaaacggatggttccaactttcggatcggtatccagaaaccatttgcagaagacgggacagttatggctgttcttccggtatctgataagtccatcgtatcttccggaaattacgaacgatactttaagaaagacggaaagatttaccatcatatcattgacccttctacaggatatccaatagaaaataacttaaaccaggtcacgatcatctctgacaaatcggttgacggggacgccttaagcacaacctgttatgcacttggactggatgaaggattaaaacttatccgaagtatggataatatagaggctgtatttattaccgatgacaatacgatttataaaagcagtgactctgtcgatttaatcactgatattgataactaaagaaaaggaagctgatcattttaaatcttcagcttccttttctgatctcttttttcaataaaatcctgtcgtattattaacgtaacgtaataatctttctcggacatttttctacacaaacaccacactctgtacatttatctgcatcgatatgtgcaaggaaattcgttacagtgatcgctcctgcttcacagttcttctcacaaatgcgacatccgatacatccggcctgacagattgtcaactgtatttttccttttgcattggaattacagcgtacaaatgtcttctgctcatatggaatcagctcgatcaggtgttttggacatgctgcaatacattttccacatgctttacatgcttctttgtcaacaacagcaattccatctactacatgaattgcatcaaatggacaggcagcaacacaagaaccgaatccaagacatcctgaattacatccctttgctcctccattctgcatcatgcttgccatcgtacaatcctgaatacctgtgtaatcataatctaaaattgctttttcgcaggttccggcacattttacaaaagcggtctgtctctcctgtgtgcctgctgcaacacccatgatctctccgatctttgcagcaacaggtgccccaccaaccggacatccactgacttctgcttcaccttttacgattgcagctgcaagtcctgaacagcctgcataaccgcatccaccacagttatttcccgggagaacgcctaaaatcgcttcttcacgttcatctacttttacagcaaacttcttacctgcgattccgaggaaaacaccgatgaataaaccggttccaccgacgactactgccgccaaaataattcctgtcatactcatttgctcttcctcctaaattaatcccgagaatccgaaaaatgcaattgccatcagtcctgctgtaacaagcacgatcggagtcccctgaaatgactcactgatatcattgtattcaatcttctcgcgaattccggccatcagcacaattgatacaaggaatccgacagctgtagcaaatccatttacgacacctgtgagaagccccatacctgcactcatgtcatcatagtagccattctgtacgtttgtcagtgctactccgagaactgcacagttcgttgtgatcaacggaagatatacaccgagcgcattgtataatgatggcatcaccttctttaagaacatctctacaaactgtacaagtgctgcgataacaagaataaatacaatcgtattcaggtaagataattctcctcccatgatatttggatttccgagaataaacttatagatcaatccagttacaaaagatgcgatcgtaataacgaatacaaccgctccgcccattccggcagcagtcttcacattcttggatacaccgaggaacggacatataccaaggaactggctcaggacaacattatttacaaatgctgaaccaactgcaattaataataattctttcactttctgtcccctcctttattcgttctttgcgtcttcttcgcctgtcgggaagatctttccactgcaggatgaagcattcccgcagcttgcacagccttctccgcatccgactgtctccggaaccttctttcctttctttgccatattgttctttactttattctgtaaagcaacaagacctgcaaggacaaagaatgctcccggtgcaaggatgaagattgtcagtggctcgtaagattccggcatgacacggatatcaaagatcttaccagcaccgatcagttctctgacaataccgattgctgtaagacccacagtaaatccaagtcccataccgattccatcaaagatagaaggaagaaccggattctttgaagcatagctctctgctcttccgagaatgatacagtttacaacgatcagaggaatataaagtcccagtgaatcataaaggcttggaacaaatccttccatcaagaactgtacaattgttacgaaagaagcaacaataacgataaatgccggcattctgacagaatccggaataatctttctcaacatagaaatcaacatgttagacatgatcaatacaactgttgtagaaagtcccataccaacaccgttgattgcagatgttgtaaccgcaagtgtaggacacataccaagcataagaacgaaggtcggattttcttttacaaggccgttatacagccgttctgtacatttattcattacttccgcctcctaactcattttgaaaatatacaagtgcagagtctactgcatttgtcacagcattggttgtgatcgtagcaccactgatggcgtcgatcatgtcatctcctgactctcctgtctttgtatatgtaaacttttttacattcttatctttaaactgatctttgaaatctgcttccttagctttcattccaagacctgctgtctcactgatactgagcatctcaatacctgttactgttccatcttccctgatacctacagaaatatcaatgtctccgccgtatccttcatgtgatgtaacatttacgacataaccaaccgtctcaccggaagcgtcttttccctcagccaactcagatatatcatctgaagtgtatccattttctttcagaagagcagaagctgcatcagcatcaaattctgtatccgattcaaatgtctctgcatctgaaagaacagaacgaaatgcttcctgttttgcctcctcctgtgctttagcgatcggatcttttgtcacaccatatacaactccgagaagaagacctgcaacaacagtgattgctgtcagaatcaacgtgtttttaacaattttattcattacttctctcctcctttaccaaatggttttggaagagtaaccttctcgatcaatggaactaaaaggttactgatgatgatcgcataggaaactccttctgctgatccaccaaaaagacggaacagacccgtcagacatccaagacagattccaaaaaggatctttcctttgctcgtgatcggagatgttacataatctgttgccataaaccatgctccaagcatcagaccaccaccacaaagatgcgctgtgatgtactgaggatcgaatccatgtcctccaaacaatgtgataaaaatcacaaatgtcacaatgtaagttccaggaattctaagatcaattacacccataagaatcaggaacattgcaccgatcataattgcaactacagaagtctctccgattgttcctctgatatttccgagaagcatagacaatgtattcactgtttctcctgctttcagttctgctagaggagtcggtcctgtcactccgtcgtaaacaaaataagtcatctttcctgcaaaacagatcagcagaaaacaacgtgctcccaatgcagggttcatgaagttctgtccaagtcctccaaacaactgtttcacaacaatgatagcaaatactgcaccaagcacacccatccaccacgggagtgtcggaggaagattcaatgcgagcagaagtcctgttacaaccgcactgaaatcattgatcgtaattggcttatgcattaatttttcataaagatactcagataaaacagccgctgccgttgtaacaactacaagaatccaggcattctcatgacggaaattccagattccgaaaaatgtagccggaagaagtgcgatcacaacataaagcataatgttgctgcttgtcactttatcacggatatgcggcgaagaagatacgttatatttctcgttcactttacttcaacctctcttatttcttctttctattcgccaatgctgtcttacgcattgaaccaattgcctgtttcagctgacgtttcgccggacagacataactgcaggaaccacattccacacattccaatccattccatgcaacaaaagatgcctcatcttttctctttgaaaagtctgcaagtctggatggaataattctgcttggacagatctccacacatcttccacagttaatacatgcagtctcaagactctttgccacaacgtcttctttaaaaagcagaatagaggaagaagtctttgtaaccggtgcatccattgtcaccatggcaaatcccatcatcggtcctccggagatcagtttctgcggttccgctttcaaacctcctgctgcctcaaccagctctctgtggtttattccaaaaggagccataaagtttcctggtttttcaactgcatcgccgctcactgtaacaacacgttccatcaacggttttcctttgattaccgcattgtggattccaatcaaagtctccacgttatcaacaatacatcctgcatctgccggaagcatggtagaattgattgctcgttttgtcactgcatagatcaactgacgttctgccccctgtggatattttgtcatcaatgctttcacatcaattcttggatcgccggaaactgctttctgtaacttttcaatacaatctttcttgttatcctctacagcaaaaacacctcttgcatttgggaataaagaaaggatgaccttcattccgctgacaagatcttctgtatactcgagcattcttctgtaatctgcagtgatataaggttcacactcagcacagtttgcaataatatattctatcttatccggttccttcggagaaagctttacctttgtagggaatcctgcaccacccattcctacgattccggcatctccaatcttattaatgatttcttcccttgtcatctcttccaaaggctttaccggttcatattcaacttccttatactctccatcgttttctacaacaatgcactccacctgggatccagttggattaaaacgttgttccaatcctttcactttaccggagacagatgaatagatcggagaagatacaaatcctcccgcttcagcaatcaactgtcctttcagcacacaatcgcctttcttaactaccggtttagccggtgctcctatatgctgtgaaagtggatagaccagttcaccctgaggtactacaggtctgatcggctgatcctttgaaaaacgttttccatcatctggatggattccgcctttaaatgtcaaaagccccatctcatttccttcctttcttttatcattgtcattacaacaataatattttaattttgtaatacttattttactagaatgcgctctgaaaatctagcaaatatgtaataattcttgtatctttcgctatacatcttgtcgaatttttaacagaaaaagaacctgccaatggcaggttcttctaaaaaataatttatatcttattcctctgtctctccagcgttgtcagcctcaagagctttcatgctcaggctgatcttcttctctgcttcgttaagatcaacgatcttagctgtgatttcctgtccgattgcaagaacatcagatggtttctcaacatgagctcttgaaatctgggatacatgaagaagtgcgtcaactcccggtgcaagttctacgaatgcaccaaagtctgtcatacgtgcaacttttcctgtaactactgtacctacagcgaaatcttctgctgcatttacccatggatttgtctctgggaatttcaggctgagcgcaatctttgtatcatgaatgtcttttacaagaactttcagtgtatctcctacatggaatactttcttcggattgtcaactcttccccatgacatctctgagatgtgaagaagtccgtcaacaccaccaaggtcaacgaatgctccgaaatctgttacattcttaacagttccttctactgtatcaccaacattgagtttcgcgaacagctctttctgcttctcagcacgctctgctacaagaagctgtcttctatcaccgatcacacggtttcttctcgggttgaactcgctgattacgaattcgatttcctgtccttcatacttgctgagatctttctcataagaatcggaaacaaggcttgccgggataaatactcttacttcatcaactgttgtacaaataccgccgccaagaatctgtgtaactgtagctttcagcacttcgtggttttcatatgcttcgcgcagtctctcatttcctttttctgcagccagtctcttatatgtaagaagaacctgaccctctccgtcatttactttcagtaccttaactgtcattgtatcacctacggatacaactgttgtaaggtcaagagactgatcgttggaatattcgctctttgtaatgataccgtctgctttatatccaatgttcaggataatctcatccggtttcacgtcgattactgtaccttcgacaacctctccattgtgaattgttttaaatgactcttctaacatctgttcaaaagataattctgacattattttgaacctcctcaattatattgttgggcgtggatgcccctgctgtaatacctaccgtttccactgaccctaattgattcaaatccaaatcgccaagtgtctgtatatagtacgtattgttacatgctttgcggcatatttcaaataacttctgggtattggaactatgtttgtcaccaataacgatcatagcatccaccgtctctgctatgctctgcgcttctgtctggcgctccttcgtagcattacagattgtatttaaaacacttacatcataactctttttttcaagaatttcaactaattctttaaatttattgtaattaaatgtcgtctgggcaacgatacaaatctttttcccctgctcacaagaataattttctgcttcttcctttgtctgaaagacctctacatggtctcctgcccagcccttaattccctgaacctccggatgttccggatttccaatgataataatattctcgcccatctcactgtgtttctgcacgatattatggattttcttaacaaatggacacgtagcatctacaatctggattttcttactttccaatctgtcatacacatcttttgccaccccatgagagcggataataacagttcccctttccagtgtatccagctcttcttcgctgcgaaggacgatcacacctttctgctccagatctttcaccacttcttcattatggataatcggaccatacgtatagatcggaagattctgattctctttcacctgttcgtaaactgtatccactgcacgcttaacgccgaaacaaaatccagctgatttcgcctttattactttcattctatccaactcctgcaaatttatctatgacaatatctggaaatcgtgtttacaacttctttcagtgtcatatccgaactgtcaacaagtatcgcatcctctgcttttttcagtggcgcgatttttcttgtcatatcacggtagtctctttcttcaatatctttctctatctctttcagatcgcactgcactcccttttcaacaagctctttatatcttctctttgctctgatttctacgcttgctgtaagatagatttttacatctgcatctggaagcacatgggtaccaatgtctcttccatccatgatcacatccttctctcttgcaagcgttctctgaagttccaggagttttcctctgacttccggaatcgcagatgtcatagaagccatatttccaacttcttctgtacgaagctttgctgtaacattctctccgtttacatagatctgctggattccgctttcataaccaatcgttacttccacatctttgcaggcctctataatcttttctgtatcttttggatcaattccaagattcagaaagtgaatggccaatccacggtacattgcgccggtatctacataaatatatccgttttcttttgcaacctgctttgcaattgtacttttccctgcccctgccggtccatcgattgctacattatatcccatttttattcctccatcttttctttctacattccattttcaaatctaacagtaacatctattcttcctgtcacaggattcagacattccccagtaaaatttcaatcacatcctgcgttaattccggcaagataccctgttgaccacgcaatctgaagattatatcctccggtcactgcatcaagatcaagcacctctccggcgaaatataatcctttcattttttttgattccattgttcccggatcgatctcctttacagatactccgccttttgtaatgattgcttcattataactgcgaagccctgtcaatgtcattgtaaaatccttgatcagatgaaccagtctctgtcgttcttcttttgtaatctcattcacttttttctcaggttcaatctccgagagttctatcataacgggctttaattttgccggaaagagtgaatcgattgaatttttatactgtttattatggtttgcatcaaactctctgaggattcttttatcaagttgttcctcactcaatgccggttttaagtctatatgaagtgtaagttctttttttcttaaaatttttcccaccacactgctcgcgctcagaataaccggtcctgttacaccataatgtgtaaaaagcatttctccgaattcttcgtagagttttttcttcccatctgtgatacaaatttctatatttcgaagagataatccctgcaattctttcgcataccattgtctgacttccatcggtacaagtgatggaaggagttctgtcactctatgccctgtttctttcgcaaaacgatatccatcgcctgtagaacccgtagaaggataggaaataccacctgtcgcaacaatcacagcatctgccttcattttctttccattagttaataaaaccccgcacactttatcctgttcacaaagcagttctctcacctctgtgtgaagagaaacagctactcctaatgattttaactctcttgaaaatgctgcgatcacatcagaagaatgatctgaaacagggaaaactcgttctccacgttcaattttcgtcttcacaccaagttcttcaaagaaatcgatcacctgctgatttgtaaaactgtaaaatccactgtataaaaatttcggattacttgtcaccgccgtaaataaatcttctatatcagcggcattcgttatattgcagcgtccttttcctgtaatgaacagctttttcccaagcttttcattcttctcaagcaactgaacattctgaccatttcttgcagcgaaaactgccgccatcatcccggcagccccgccgcccactacgatcacattactcatgctctattcttctcctttattctgtctgtaagactcgttcgttcctgcgctgccaccttcctggctgctttcttctccgctgtaaacctgatattcaccccagattttctccagagtctctaatgtcgagacaacttctttctgttttttcatacagattgcaacaatcagagcattgatcacactcaatggtgcaacaagtgaatcgacaatagatgccatatcacttcttgcgatcagattgcaggaagaatactgattcataggtgaatggatactgtcagtaagtgtgattacttttgcctttctattgttcgcaaattccaatgctttcaatgttctcatcgaatatcttgggaaactgattcctataatcacatctccttccccgattcgaatgatctgttcaaaaatctcactggaactgtttgtatttactgtaattacattgtcgcatacaagattcagataaaatcccataaaagaagcaagtggtgcacagcttctgattcccacaacatagattctctttgcttctaaaagggtatcaatcgcccagttaaatgccttatgatcgattgcagacaaggtcatcttgattttctcaatgtctgactgaagaactgtttcaaggatctcactctgtgtaattcgtccataggtcacttccatacgctggattgaattcaacttattacggacaagttcctccaatgctttctgaaattccgggtatcccctatatccaagctgggttgcaaatcgtacaaccgtagattcactgacacccacaatctctccaagacgcgccgctgtcagaaatacagccttatcataattttctttcacatattctgcaaggcgcttctgccccttgctcatcttctcatattttgcttcgatccttccgatcagctcattcatattcgcttcaatattgcgttctgatgtttccattcttttacactattcctaatccctaaatatttcattatccgtccatcagcttcaacagatacataagagttctgtcatacctctgctttgctgattacttcacagcccgcgtgtactctttcagccagattcgttcttcctctgaaaggtaaggggacactttttcataaacctgcttatgataatgattcagcatttctttctcttctgtactcattttctccggcaagattgcatccagatcaattggtacataagtaagaatttcaaaattcataaactgtccatactcattcttaactgtttttctgacaagcagctcattttccagacgaattccatgggaaccctcaatatagatccccggttcatctgtaatcaccatattttcttccaatgccggagccggtctctctccctctttccaacggaaattgatcggtccttcatggatattcaataaataaccaacaccatgccccgtcccatgattaaagtttaatccttctttccaaaagacctctcttgcaatacaatccagattcgcaccactgcatccatagagaaatacagtgtttgccagacgcagcattgctcttgcaaccaatgtgaaatattctttttcaatattccccacttctccaagtgcaaccgtacgcgtaatgtcggtagacccttccaggtaatgacctcctgtatctgtcatgaaaagctttccttcttttaaagggacattgcttttctcatccgcactataatgaacaattgccccatgttctccatatgcactgatcgggccaaaacttggtccgaggaaatgctcctgctctgcacgtaatccttccagcctggcagaagcagacaactctgtaatctccactctgccaatattcttctttaaccagtacataaactttgtatgtgcaacagcatccttcaaatgcgcttttctcaaattctctgcctgtgtttcatttttaactgacttcatcaggatttccgggttctgcttatcaacaatcaccgtctctttggaaatggcctgataaagactataattcatgattgcagaatccagaagaagcttatcttctgatgtcatttctgaaactttgcgataaatatcctcatacggataaatcttcacttgattttctgctaacaaatttataatatcgtcagagaattttctaatgtcagcaaacagctcaactgaattattataaacgattgcgtaagaaagaacaagtggacaatatgcaatatcatttcctcttatatttaaaagccatgcaatatcatcaagactcgataaaacatgtgcattgcatccattttctttcatcacttctctgactcgttctaatttggatccaattttttcgcctgtatattcatcttctagagaaaatacaggttccatagacatttcaggtctttccttccagatattctgtgcaaaatctaagcggtatttcaatgatgcgccattctcgtctgcgatatgacaatatcgttttccttgtgcataagtcactgtacgaccatcaaatcccagaacatccccttctttcagctcactttttaaaaattcttctatcgttggaacatcagattctcctgatttatagagcgtgatcccgctccccttcaactgagcttctgcctgaataaaatatcttccatctgtccagagtcccgctttatcctttgtaaaaactgcggtacctgctgatcctgtaaagcccgttatatattcgcggaatttaaaataatcaccgacgtattcactgtgatgatagtcatctgtagggatgatatagcagtctattttctgctgttccattacatttcgtaatcgctctattctgtctaaaacactcatatctgcctccatatattccaacaatcaaactcatattataaaaaacttgattattcaaaattgtacacatctatgataccaccaaataaatttccttacaaatgaaaaagaccagaaaacacaaatctttcaatctgttatcttctggtctttctattcaattcataatctaactaaatcagtcaggattataccggataagatccgttctctgtatctgctactgtagcatctacttttgtctgctgagcctgtctgtatttgaagaagtcaacagcaacctgtgggaacagtgcatatgtcagtacatcctcatcctgctggatccactgtgcacactctttacgaagtgtatcaagctcatccgggataagatctgccggacggcaagtgatcggttcttcatctccaagagccttcttctgaagttctggatcaaccggttttgttgtcttaccgtatttacctgcaagtacatcctttgtctcttttgtgatcatcttataacgctcacccatcagtacgttgaacacagcctgtgttccaacgatctgtgaagatggtgtaacaagcggtggctcaccaagatctttacgtacacgcggtacttcttcaagtacttcgtagaacttatcttctgctccctgctctttcagctgggatgtcaggttggaaagcattcctcccggtacctgatacagaagagtcttgatattaacaccaaggttcttcggattgagcagtccgctctcaagagcatcgtcacggattggacggaagtaatcagcaatctctgcaaggagactctgatcaagtcctgtatcgtatggtgttcccttgaatgtctcaaccataacttctgtagccggctgagatgttccaagtgcgaatggagacattgctgtatcgatgatgtcagctcctgcctctacagctttcatgtatgtcatagaagcaacacctgatgtgtagtgtgtatgcatctcaatcgggatatttactgcatctttcaatgccccaacaagctctgttgtcttatatggaacaagaagtcctgccatatccttaacacagattgagcttgcacccatatcttcgattctcttcgcaaggtctacccagtactccattgtgtaagcatcaccgagtgtataagacattgcaacctgtgcatgagctttctctttgttcgcagcctttacagctgtctgaagatttctcatgtcgttgagacagtcgaaaatacgaatgatatcgattccgtttgccacagatttctgtacgaaatactctacaacatcatcagcgtatggacgatatccaaggatattctgtccacggaacagcatctgaagttttgtattcttgaatccatcacggaactttctaagtctctcccatggatcttctttcaggaaacggagggaagcatcgaatgttgctccaccccagcactctacagcatgatatccaaccttgtccatcttctcaacgattggcatcatctgctctgttgtcattctggtagcaatcagagactgatgtgcatcacgcagaatagtttctactattttaactggttttttttcaatttctgccatttatttatcctcctaatttacttaacgccgaaaatagccataaatgttccggctgctactgcagtaccgataactccggcaacgttcggtcccattgcatgcataagaaggaagtttgtaggatctgcctcagcaccaaccttctgagatacacgggctgccataggaaccgcagatacaccagcggaaccaatcagcgggttaaccttaccatgtgtaaggacgcacattaacttaccgaagagaactccggcagctgtaccgaatgcaaatgctataagaccaaggataacgatcttgattgtattccagttcaggaatgcttcagcacttgttgtagcacctacagatgtaccaagaagaataactacgatgtacatcagggcattggaagctgtctctgtcagctgtcttacaactccacactctttgaacaggttaccaagcatcagcataccaacaagcggagctgttgtaggaagaatcacacatacaacgattgtaacgataaccgggaagaggattctctcaagcttagaaaccgggcgaagctgatccatcttgatctttctttccttctctgttgtgagaagtttcatgatcggtggctggatgatcggcacaagtgacatataggagtatgctgctacggcgatcggtcccatgatagctgtctgctgcagtttacctgcaaggaagatagatgtcgggccgtcagctccaccgatgatggagatagcagctgctgctttgtctgaaaatccaagagccatagctccaagataagctgcgaaaataccgaactgagctgctgcaccaagcaggaaactcttcgggtttgcgatcagcggaccaaagtctgtcatcgctccaactccaaggaagatcagagaaggaaggatggaccactcgtcaagctgataaaagtaatacagaagtccaccagttccgttcgctgcatcctcagcatgaagcataatatccggatagatatttacaagcaacataccaaaggcaattggaacaagaagcagtggctcaaattcgtggcgaattgccagatagagaaacacgcaggcaacagcaatcatgatcaggttaccaaatgtaagattcatgaacgctgtctgttctacgaggtttcccaatgtatttgaaatatattccatttgtaaaaacctcctggttcagttactagtttaatgtagcaagtacagctcctgattcaacagcatcacctactgccacatcaatgctggcaatagttcctgcctctggggcaacaactgggatctccatcttcattgcttcaatgataataactgtatctccagcctctaccttctgtccaacagatgtaggaacctggaatactttacctgctgctccagcttttacctggatgcttccagcgcctgctgccgctttcggtgctgctgccggagctgccggtgctgctgctctaggtgctgcaaccggtgcgcctgcaccattctcttctactgttacatcatatacatttccgtttactgtgattgtatagtttttcatctaattatcctcctgattaattccatctgtttgattttcttctcttaatagaacgaacaacaaatccatctgtagaagttccctctgctgctgcaattgctgctgcgattactgctacaagttctgcatcatcttctgctgcagctaccggtgctggagctgcctgtacaggtgcttccttcttctcttccactttcttatctttatttgccaacttctcctgaagtttcggaatgtatccaagcagataaataatgaatgaaatgaaaatcaatacaacgaatacagttcccataccaagtaccgtattcagaccggctttctcaaggatttctcctgttgaataatgagcagaaacatccatactctccatgttgcccttttcgtcaaaactgaagacgatgtctgcatctctgttttcatattttgcttcagatgtgagtgaaactccatcgttctttacttccattgtccagtcgccatgttcaacataagcaccgcactcttcttctgctgcttcccaggagctgatcattgtaaggaagtcctctccatcaaccggaagtcctgcattcataagctgtgtgtcaagctgaagatcacgcatatcagaaaagctgtcaagctgctctgttgtcatcgcttcgaaattctgaacaacaaactcagcatactgttctaatgttgcctgatcatattctgttgtctcagacttaccacatcctgtgaagctaagaacgagaatgaggataagtcctaataaactgatttttttcttcacttcgcctcacctcactaaaccgttccgtgtttcttagccggacggtcctctctctttgtgaacagcatctcaaatgctccgatcacatattttcttgtatctgccggctcgatgatcgcatcaacatatcctcttgctgctgctgaattcgggcttgactgaagttctttgtattcagctgctttctcattaagagtctcagcatctgcgtctgcgtacatgatctgtgctgcaagcttcgcatccatcattccgatctctgctgttggccatgcataaacaagatctgcaccaattgacttactgttcatagaaacgtaagcacttccgaatgccttaccaacgatcacatttaccttcggtactgtagcgttagcaaatgcatatgtcagttttgcaactgcgcttgccatgttcttctctgactctactgtagcagcaaatcctgttacatttgtcagtgtaagaaccgggattgagaatgcatcacagaagtttacaaaatctgttgccttcttgcatccatctactgtaaggacgctgtcgaactcagcctctacttctgcttctgcattgtatactttagagcggtttgcaacaacaccaactgtcattccgttcaggcggataaatcctgtaaccatctcttttgcgtagtctttctttgtctcaacaagaatctgattgtcagcaatctgtgccagtgcgattgctgtatcctcagatgcgttagcaatatctgcgcagatacggttcaggtcatctgtacattcctcataagacatatcatcttcattgtttgccggaagcatacatacaagatcacggatctgtccgaggatctctgcctctgcaccgattccgtctacaagacctgctgtcttgctctggtactcagcgcttgctgtgttacactttgaaatctcatttccttccagtgcatttggagaattaacgaaaagttttccgtcttttgcttccataaatgtgaaatctgtaagccccggaacaactgcaagaccgccgccgcacattccaaagattgctgtaacctgcggaatcacacctgatgcaagtgcctgtttgtgataaagacttccaaatgcctcaagtgcatctgtagcttcctgaagtctgagacctgcacagtcgatcagtccaatcaccggtgctcccatcttcatagccatatcatagattcttgcgatcttcttcgcatgcatctctccgagtgctccacccaaaacgtcagcatcctggctgtatacataaaccaggttaccgtcaatcactccatatccagtgataacaccgtcagaaggagctgccttctcctgcaagttgaaagttgtgcttctagctgtaacagctccgccaatttcaacaaagcttccctcatcaagcagtgtggcaattcgtctgcttgctgagttttctgttgcattgtagctcatattttagccctccatacttataaaataattttaaaataaaccaaaatttctgcctattgtattatatactaggccgattaaaatttcaattcatattttccgcaaattgacatttttttcacaggacattgtttttgtcgagcttggattcttccagctggtaaatacttttttatattttatatccgtgatgtgggggctttattgcatcagacaccggcccgctctacctcatccctttgacaatctgtaacagaaaagtcagaacactcaccgtgagaggttcgtgtctgtcttttcctaacagattctgcaaagtgtattcggaacgctcctgccttatatgtgtcctcaacaataaagtcccccacatcactacgctatctaaaggagaagtttttatcccaaacaaagcgaatccagaagacaaatacagaattaacagccgggagaaggtggagctttgtcgatgaagatttcttgatcttttgactttagtttctgtattttcgagtgaattttgtatttgtaggagaaagtttaattttgaactacgcaagcaagaacgggtctactgttgccaggggcacatataaggcaggagcgttccgaatacactttgttcagtatgttaataagagccagaacaggcaccacacacggtaactgttctggctcttatgttacatactttcaaagggatgaggtagagcgggccggtgcccatggtaatagtagacccattcttgcgaccattctgtcaaaaacttagcccattgtataaattccctcgataaattacagtctcttcgctattgctttaataaactcctcactattgagtactgtcggattctcgatcgttgtgatcaaagcgaggtcttttgtcatctctcctgcttcgattgtgtcgattgttgctttctcaagtttatctgcgaagtccatcagatctttgtttccatccagctcgccgcgttttctgagagctcctgtccatgcgaagattgttgcaactgagtttgtagatgtctcttcacctttcaggtgcttataatagtgacgctgtacagttccatgagcagcttcatattcataatatccgtccggagaaacaagtacggatgtcatcatagcaagtgaaccgaatgcggaagataccatgtcgctcattacatctccatcgtagttcttacatgcccagatatatccaccttctgatttcataacacgggcaacagcatcatcgatcagtgtgtagaaatactcaattcctgcctctttgaactgatcagcatattctacatcaaagatttcctggaagatatctttgaatgtatgatcatatttcttagaaattgtatcctttgttgcaaaccacagatcctgttttgtatccaaagcgtaagaaaagcagcttcttgcaaagctttcgatggatttattgatattatgcattccctgtacgattcccggtccgtcaaactcatgaaccagttcttttgtctggcttccatcttctgctgtgtatacaagttcaacctttcccgcccccggaatcttcatctcggatcctttatatacatctccataagcatgtcttgcaattgtaattggtttcttccagttctttacacatggctcaattccttttacaacgattggagcgcggaacactgttccatcaaggatcgcacggattgttccgttcgggctcttccacatttctttcagatcatactcatccatacgtgctgcattcggagtgattgttgcacattttacggcaactttgtatttctttgttgcgagtgcggaatcaactgttacctggtcatctgtctcgtttctgtgttccaggccaagatcataatattctgtcttgagatcaatatatggctcaagaagattatccttgatcatcttccagagaattcttgtcatctcatctccatccatctctaccagtggtgttgtcatcttaattttttccatcttttgcttcctcctgattatgtttttcttctattttctttaggttctgcatgacatgaacaatatgttcctttgcaagctgttctgccagatccgggtttctgtccctgattgcctgaagaattgctttatgctcctcaattgacttctcggctcttgccttcacattgatcgaggacttccttgccatttgaacatatcggtgaaaatctgtaagaacatgacacagcatcctgcttccggaagcctcatataatatcgtatgaaatcttccgtctaatcctgttacttgttctttattgtatccattttctttcttcatctgaaattctgaaagtaaaatagtctcttctaattcttctaactggtcttctgtaatatgttccgccgcccatctggcgcacattccttccagatacttacgcatctgatagatatcccagatatccttctggctgattccggtaacataagcacctttattcggtacaatcgtcacaagaccttctaattcaagctgtcttaacgcttcccttactggagttctgctgaccccgagttctttcccgatggtagcctctctgagttcatcctgttgtttgtatctgcctttgaggatatcttcacggagtctcttaaaaacacgtcctcccagagaacggtcctgatattcttccatgatttcctcctattctctttttgtatgattgtatacgattatacaaatattgtcaagatgatttcatgccgatatcattgtattaaaatgtatccatttttgcataatacttctccatactatctgttcatttttatatgctttgtaccatatcttatttatcaacttattgtatacaaaaaggtggtctctcacatagaaaaaccaccctgttcttttcgttataaattagctttcaaaatcagcttagccaaattacacttcatttattttttatttgatcacacgtacaccaagtacatctgcgattgattccagtttgtttacaacatcatcagatacgcttccgtctacatcaattactgtgtatgcatactctttcttgctcttatttgtcataagtgcgatattctgattctcctgtgcaagaagtgttgtaaactgaccgatcatattcggcacattacggtgaagaattgtaattctgtctccgccagcttttactcccacgttacaatccggataattaacggaatgtgtgatatttccgttctcaaggaaatcacggatctcagcaacagccatctgtgcacagttgtcttctgactcttctgtagatgctccaagatgcggaattacaattgcgccttttacacctacaatttcctttgttgggaaatctgttacataacggtgtactttacctgctacaagtgcatcaacgatatcttcctgatttacaagaacatctctggcgaagttcagaattacaacgccctctttcatcagactgattgcattcttgtcaatcattccctttgtactgtcaagtgcaggtacatggatcgtgatataatcgcactctttatagatttcatctactgttgttgcgtgatggatacttctggaaagtctccatgcagaatctacggaaacatatggatcatatccataaacttccattccaagatgtgttgctacattcgcaacaagaactccgattgctccaagtccgatcacaccaagtttctttccggaaagctctgttcctgcaaatgcttttttcttcttctcagcaatctttgcgatatctccatcttcctcgaattcctgtacccactgaattccaccaacgacatctctggctgcgagaagcattcctgcaatcacaagttcttttacaccattcgcatttgctccaggtgtattgaatacaacaattccttcctctgcacatttatcaagcggaatattattcactccggctcccgcacgagcgattgctttcaggttctttccgaattccatctcatgcatttttgcactgcggacaagaatcacgtcagcttcatccgcattttctgtctttacataattttcatccaacttattcatgccaacggcagaaattggattcaggcaatgatatttaaacatcttacagattctcctcttcaaatttcttcataaagtctacaagtgcaacaacaccctcatatggcattgcgttgtaaatgctggcacgcattccacctacagttctatgtcctttcagattctcaaatccagcttcttttgcttccttaacgaattttgcatccagatctgcatcgcctgtcacgaatggtacattcataagagaacgatcttccgggacaacagttcctttgaacagtttgctctgatcaaggaaatcataaagaacttttgctttcttttcgttgcgttctttcattacttcaagtccgcccatcttcttaagccatttgaagactttaccacagatatagattccgtatgccggtggtgtattataaagagattttgcatctgcatgtgtcttatatgtaagcattgtaggtgttcccgggagaacatcctctgtgatcagatcttcacggatgattgcgatcactacaccagcaggtccgatatttttctgaactccaccataaatcattgcatattttgttacatctacaggttcggaaagaaaacaggaggagacatctgccacaagatcttttccttttgtgtttggcagtgttttaaattttgttccgtaaatagtgttgttttcacagatatatacgtagtctgcatcttctgaaatcggaagatcggaacagtctggaatgtatgaaaatgtcttatccgctgaggatgcaacaacatttacctttccatatttttctgcttccttagctgctttcttagcccactgtcctgtgacaatgtaatcagcaaccttattcttcatcagattcatagggatcatagcaaactgctgtgacgctccaccctgaagaaacagtactttatagttatccggaatattcatcagatctctgagatcctgctcagcttctgtgataatttcctcgaaagctttggaacgatgactcatctccataacagacattcctgttcccttgtagtccagcatctctgctgccgcttccttcagtacttcttctggcagaaccgccggtcccgctgaaaaattatacactctactcatttttaattacctcctgttattgtgtatctatagaaactccgttttcacagattttctcacataaaaataaaatattcctttatttatcagtcatacaactatgtggctgaaacttattatttttagttttcttttgctttcagatcctgctcatcaaatgcttcgctgatcggtgctcccggcgcaaccataggccataccttatcatcacagtcgatcatacaatcgatcagaaccggttttccacatgtcaatgctttcgcaaagcactctttaaactcctcctgtgttgtagctcgaagtcctactgctcccatcgcttctgcaagcttcacatagtcaactgcatcacggagaactgtcgcagaatatctttcatcatagaaaagatcctgccattgacgaaccataccgagtacatggttattaactacaacctggataatcggaacatcatgtcttacggctgttgcaatctcattcatattcatacggaaacatccgtctccggcaatatttacaacaattttatccggacatcctgtcttcgcaccgattgctgctccaagaccatatcccattgttccaagaccacctgatgttaaaagtgttcttggtttcgtatatttataatactgtgctgcccacatctgatgctgtccgacttctgttgtgataattgcttctccatttgtctgacgataaatttcttctactgcaaatggacctgtaagtacatccttatgatatgttaatggatatttcgccttgtaatctttaatcttattcatccattccggatgagactgctgtggaagatgctcatttattttcttcaggactgctttaatatcacctactaacccaagatcgatcatgacattcttatccatctctgccggatcaatgtcaatctgaagaatcttcgcgtcttttgcaaatgttgcagtatttccggttacacggtcactgaatcttgctcctgttacgatcagaagatcgcattcacttactccaaagttcgacgcctttgttccatgcattccgagcattccggtatatctctcatcagttcccgggaaagctcctttccccatcagagaatctgttaccggtgcatctaccttctgtgcaaattcataaagttctttacttgcctcagaaagaacagatccaccacctacgaaaatatatggtctctgcgcttctttgatcatctcaacagctttcttgagatcctcttcttctgaatggattacctctcggtcatatacacctggatattccttctcatactctgtaactttcgcagtaacatccttcggaatatcgatcagcaccggccccggtcttccagtcttagcaatacgaaaagcctttctgattgtttctgcaagctttgtcacatctttaacgatataactgtattttgtaattggcattgttactccagcaatgtcgatctcctgaaaactgtcttttccaagtaatgggacaccgacattacatgtaattgcaacaatcggtatagaatccatatatgctgttgcgattcctgttacaagattggttgcgcccggtccgcttgttgcaaggcagacccccacttttcctgtagctctcgcatatccgtcagccgcatgtgctgccccctgctcatgagaagtcaggatgtgacggatctcatcacggtgtttataaagttcatcatatacatttaaaattgctccacccggatagccaaatacagtgtcaacgccttgttctttcagacattcgatcacgatttctgctccatttaactgcatgacgtactctcctcctggttctttattttattttgccttcggtacttcgagaattgctccgcggttacctgatgttaccatagaagcatatcttgcgaggtatcctgtcttaaccttaggttctcttggctgccattttgcttttcttgctgccagttcttcatccgatacatccagctctaatttcagttccggaatattgatcttgataatatctccctcttctaccagtgcgatcggtccgccaactgctgcctccggtgatacgtgtccgatagaagcacctctggatgctccgctgaatcttccatctgtgataagagctactgtagacccaagtccgtatcctgcaatcgcagatgtaggattgagcatctctctcattccagggccgccttttggtccctcgtaacggattacaataacatctccaggattgatctttcctgtcttgattgcttctgtcgcttcttcatcactctcgaagattcttgccggtccttcatgtacaagcatctcatcacatactgcagaacgttttacaacacttccgtccggtgcaagatttcctttcaatacagcaagtccgcctgtctgagtatatgggttgtcgattggacggataacttccggattcttattctcacatccggcaatattctctcctactgtctttcctgttacagtcatgcagtctgtgtgaagaagtcccttcttattcagctcattcataactgcataaactccacctgcttcgttcagatcttcaatataagtatgacctgccggtgcaagatgacaaaggtttggagtcttctcgctgatcgcatttgcaaaatcaatctcgaaatccataccaatctcatgtgcgattgccggaaggtgaagcatgctgtttgtagagcatccaagtgccatatcaactgtaagtgcattgaggattgcatcttctgtcataatatctctcgggcggatattctttcttacaagctccatcacctgcatacctgcatgctttgcaagctggattcttgcagaataaacagctgggattgttccatttcctttcagccccataccaagagcctctgtcagacagttcatactgtttgccgtatacataccggaacaggatccgcaagtcggacatgctttattctcaaattcgcaaatgtcttcgtcattcatctttccggctgcataagaacctactgcctcaaacatactggaaagacttgttttacttccctttacatgtcctgcaagcatcggtccgccgcttacaaatactgtcggtacattcacacgggcagctgccatcagaagtcccggtacattcttgtcacagtttgggatcattacaagtccgtcaaactgatgtgccatagcaagagcttctgtagaatctgcgatcagatctcttgttacgagagaatatttcataccgatatgtcccatagcaataccatcacagacagcaatagcaggaaccatgattggtgttcctccggccattgccacgccaagtttaactgcttctgtgatcttatccagattcatgtgccccggtacaatctcattataagaacttacaacaccgatcagtggacgatctaattcctcttctgtaagtcccagtgcattaaacagagaacgatgtggtgcctgctgaattccttttttaactgtatcacttctcattttaaaatcctctctttctgtaacaactgctaattacttaatatattcgcagatcttatctcccatctgggctgttccgatctgttcttttccttcagacataatgtcgatcgtacggtatccgtcttttaatactgctgcaacagcattttcaatcgcatctgcctctttatcaagatcaaatgaaaatctcagcatcattgctgctgaaagaattgttgcgatcgggtttgcgattccctttccggcgatatccggtgctgaaccgccacttggttcatacagaccgaattttgtatcgttcagacttgcacttgcaagcattccgatagaacctgtcaccatacttgcttcatcggataaaatatctccaaacatgttctctgtcaggacaacgtcaaactgtgccggatccttcacaagctgcattgcacagttgtcaacaagcatatgttctaatgtaacttccggatagtccttcgctacttcctcaacaacttttctccaaagtctggaagagtcaagtacattcgctttgtcaacacttgtgaccttcttgtttctcttcattgcaatatcaaaaccacgttttgcaattctgcggatttcattttcattataagtaagttcgtcttttgcggtaaggacaccatcaatctcttctgtgcttcgttttccgaaataaagaccacctgtcaattcacgcatgatcattagatcaaatcctctgtccgcgatctctttcttcaatggacacgcacctttcagttcatcgtagagaactgccggtcttaagtttgcaaaaagattaagtccctttctaagctgtaacaaacctgcttccggacgttttgatggttcgagctgataccatggagaagtcttcgcatcaccaccaatggaacccataagaactgcatcactgtcttttgccagctgaagagtctcttctgtaagcggcaccccgttcacatcaattgatgctcctcccatcagaagctgcgtgtaggaaatagaatgaccataaactttcgctgtctgatccagtaccttcattgcctcctctacgatctcaggaccgattccatctcctttgattactccaattttcatttccatatctaactcatccttccaaaatgtaaaaatctttttttatcataccgcatttttttcactgtttcaagtatttcgagtgaaaaatagagggcgctctgtatttttatcaaaaattgtactttttcaggcacattctgtctaaacctatgagaaacacgctctgcgagtttctcaagttatcacggcagtcgccaaggtctcgtgcaaacacggactttgactcgttgctcgcgtaaaataaaagaccagaaagagtcacactccttccggtctcatttttcctcttattcagcacctggcttctcaatctgagcgatcgcagccttctgcataggaatacggcaattcttattattaccgaactcaacaatcacgtcatcatcagtaatatcgatgataacaccataaaatccacttgtagtaagcgctgtatctccaatctccatatcagcgagcattgcctggattctcttctgctcctttttctgaggacgcatcagaagaaaccacataccaccgaggataacagcataaacaacaataatacctactgttcccattgaaatttcctcctgactatttcttaaacctatctgtccagtactttttaagtactaatagacaataaatctactatacacaaaaacagcttctaattcaagtgtttttctaatattccatgtatatttaagtttatttttatacattttctataaaattagagcagaaacactatttctgttccatgccttccaattttctcttcttgtatgcctggaattcccctgcatcaatcgcatcacggatttcttccatcattgtgttatagaaatacagattatgaagtacacacagacgcattccgagcatctcttttgctttcaacagatgtctgatgtacgctctgctgtagcttctacatgccggacagttacatccttcctcgatcggacggtcatccagttcatacttggcattaaacagattcatctttccatgatttgtatatacatgcccatggcgtccgtttcttgacggatatacacagtcaaagaaatccactcctcgatctactgcctccagaatattagccggtgtaccaacacccatcagataagtcggcttgttttccggaagatgcggaaccactgcatcaagaatacggtacatctcttcgtggctctctcctactgcaagtccacccactgcataaccatccagattcagttctgcgatctgctgtgcatgtgcaattcggatatcctcataaattccaccctgattaattccaaacagcatctgatgtggattgatcgtatccggcagagaattcagtcttgccatctcatccttacagcgcttcagccagcgcgtcgtacgctctacagaattcgtcatatactttctgtctgccacactggacgggcactcatcaaatgccatcgcaatcgtggatgcaagattagactgaatctgcatgctctgttccggtcccataaatatcttatgaccatcaatatgtgaattaaaatgaactccttcttccttgatctttctcaactttgcaagggaaaatacctgaaatccgccggaatctgtcagaatcggtttatcccagttcataaatttatgaagtcctccgagtttcttcacaacttcatctcccggacgaacatgaagatgatatgtattagacaactccacctgcgtcttaatccctctcagatcatctgtagatactgctcctttgattgctgctgctgttccaacattcataaaaaccggagtttcaattactccgtgaactgttgtaaagcgtcctcttttcgcacgcccgtccttctttaaaagttcatacataagcttttttcctcttcttttctttttgattttcagactatcaaagcctgccaatagttatggcaggttatatttatctttgcatttcctttaattatgtattataacaggtgttcccatactaagcattccgtaaagacttgccgcctggtctaatggcatattgatacatccatgagaaccattcgtctgataacggcttccgccaaaacttggattccatgtcgcatcgtggaatccgactcctgtccaggtcacacgcatccagtatgctaccggcgtctgataaattggctttcctgttgaaggatctattgttcctgtaagaactttatccctcttcatctcaaggatcgaataaactcctgtcggtgtctctcgctccggtgtaggaagtcctgtaacaacgtctgtctctaattgtacagctccgttaaccacataccacatgtgctgagccgggatatctacttccagataagtcgttccccaatcctgcgcgtcatgtgtagctgccgtctgtgcataagcaggttctttctcgacaacctcacctttcttaatgctgtcaacaagcgcagtcagttctgctgcctcgtcaactgaccagccgtaagtacctcccgaaacgtctactgtttttcctcccggagttgtaatacttcttgtcgttccaaccgtatcataagtctttccaaattcacgaagccactctttcacctttgactcatcaagcgttgcattcatattatcatcatatgttacccagcctgaaatcagatccttgtttacaaccacattctggtttgtcatcttataagtgatgctggctttcagataattattcatcgcatcacaggctttctgaacttccggagactctgaagtgtacttcggcatagtatagcacttctcatccatcatatttaattcactcttgaagtttgtgatcgcatccttcacttttgccttaaatgtatccacatctactttcgtaccataaacttcaggttcaacaacaaaactgttcccatcatactttggataagcagactgtggatctgtctgctcctgattcagggcttgtacggcttcaatctttgactccaatgctgcttcgtcatatccaacctcaattgtgacctcagctgaactttttgagaaaaatgcctgtggccacaaaaatgcattctgtttcttcagtgcatcctctatatctgaattttccttatatacaagtgaaatatccgatcctttgattgcatctgtcatattattctgttctacaattgtcagtttataatctgccacctgatttttaatataattctctaccgccgccgcattcttaccagaaaagttctttccgttaatctgcgtattaatatagaaatgactcataaaaaaggctgatattgcaagataaacaataacaaggccagcaataataccaccgataatcatccagatcttcttgtcaattgtcttctgctttttctttcttcttactttgcgtcttctaactactttcttttcagacattctaattctcaccctcgtcttttggattaatacttctttttgattcagacttcattatattacgctttttccaaaatgtacaccccaaactttcatgaaatacacacaaattaaaccgatgttgaattgttaattcgaacgaaatcttttagaaatacttttgtaatttatttttgaaattctgttgaattctataacattttaacttgcgtacacctctttcttcctatataattgcactgtaccctcagttatgaaacacaacaatatgtttcgtatctgggggtatgatacggaaaagaatgatatatgatatacaaaagagcattttatacgcactttttgtatcccctattgatacaaacgaaaggagttttagatatattatgagcggttcaacatttggtactttatttcgagtcactacctggggcgagtcccacggtcccggagttggtgtagttatagatggatgccctgccggcatccctttatctgaacaggatattcaacaatttttagatcgccgcaaaccgggacagagtaaatatacaacgaagcggaatgaatctgactctgtcgagattctgtccggagtctttgaaggaactacaaccggaactcctatttctcttctcgtgcggaatcaggatcagcgttccagagattatgggaatattgcgacatcttatcgtccgggacacgcagattactgctttgatcagaaatatggtttccgtgattaccgtggcggtggacgttcttccggccgtgagacgatcggccgtgttgctgccggtgcaattgcttcaaaattacttggcgaattagggattgtgctgacaacttatgcaaaatccatcggtcctgtcactgtagatgaagctgattatgattttactgagattacaaataacagtttttatctgccgaataaaaatgctgccaaaaaggctgctgaatatgtttctactcttatggagcagatggattcctgcggcggtctgattgaatgccgtgttgaccatcttccagccggtctcggtgaaccggtcttcgataaactggacgctttacttgcacaggcaatcatgtctatcggagccgtaaaaggtgtcgaaatcggcgatggctttcagagtgcctcttctaccggaagcacaaacaatgatcctttctgcatgcaacaaggagaggttatgaaaacttcgaatcattccggtggaactttgggtggcatgagtgatggttctcaattaatcttaagagctgcgatcaagccaacaccttcgatctctcagatgcagcacactgtaactaattcaggcgaagaaatcgaactgtctattcacggacgtcatgatccaatcatcgtaccgcgcgcagttgttgttgtggaagcaatgaccgcactcactctcgctgatctgctcttgcgtaatgcagtcagccggatgaatcagataaaacaattatatacggaggataaaaatgtctaataaactgatcgatatcatagatattaccaaatcctatgacgaaaatgtaattctggataaattaaatctttatatccgtgagaacgaatttctcacactccttggtcctagtggatgtggaaaaacgacactattacgtattctcggtggctttgagacaccggactccggcaatattatttttgatggaaaaaatatcaacagtcttccgccaaaccgtcgtcagctgaataccgtattccagaaatatgccctcttctctcatatgtccattgcagaaaatattgctttcggattgaggatcaaaggtaaatctaaaggctatatccgcgataagattcattatgccttaaagcttgtcaatctggaaggatacggggatcgttctcctgactccttaagtggtggtcagcagcagcgaatcgcaatcgcacgtgcgattgtaaatgaaccaaaggttcttcttcttgatgaaccacttggtgcattggatttaaaacttcgccaggatatgcaatatgagctgatccgattaaaaaatgaacttggaattacatttgtctatgtaacgcacgatcaggaagaagctcttacaatgtctgatacgattgtcgttatgaatcagggatacatccagcagatcggcaccccggaagatatttataacgaaccgcaaaatgcattcgtagctgattttatcggagacagtaatattattgctgcaaccatgctcgaagacaaagttgtccgtatgctcggtgctgtctggaaatgtgtagacgtaggatttggtcataaccgtccggtcgatgctgtaatccgtccggaagatattgatcttgtcaaacctggagaaggtgttattgacggaattgtaacaaacttgatctttaagggcgttcactacgagatggaagttcttgccaacaactatgaacttctcgtacatagcacagatatgttccctgtaggaactgaagtcggaatcaaagtagatccttttgacatccagattatgaaaaaaccagaatctgaagatgaggaggcacctgctgttgaagaatagaaaattacttgccgggccttatcttttctggtccgtgtcatttattattatcccactgctcatgatcttttattatggtctgacagataaagaagggacttttacctggtctaacattgcaatgatggcttcgcctgagaatctgaaagcactcggacttgcactgctgctttccctggtcagcacactgatctgcctggttcttgcatatcctcttgcaatgattttatctgaaaaaaacatgaaccagacaagtcttatcgtactgatttttattcttcctatgtggatgaactttcttctgcgtacactcgcctggcagacactgcttgaaaaaaatggtgtgatcaacagcattcttgcattcttccatctgccacagcagtctatcatcaatacaccgggagctattgtattaggtatggtatataacttcctgccttttatggtgcttcccatttataatgtattggcaaagattgataaagatgtcatttacgcagcaagagatcttggagccaatgaatttcagacatttacacagatcatctttcctttgagcattcctggaattatcagtggtatcactatggtcttcgtacctgcgctgacgacctttgttatttccgaccttctcggtggaagcaagattcttctgattggaaacgtgatcgagcaggaattcaaacagggaagcaactggcataccggttccggtttatccctggtgctgatgatcttcatcatcgcaagtatggctgtgatcgccaaatatgataaaaacggggaggggacagcattttaatgaaaactatagcaaaaaagatctatctggcactgatctgcattattctgtatgcaccgatcgtaactttgatggtcctctcctttaacaatactaaaacacgttccaaatggggcggattcaccggaaaatggtatgtgtctcttttccaaaacaaagagattatgaatgcattgtacacaacactgatcattgcattgctctctgcactgattgcaacattgatcggtacttgtgccgcacttggcatgcaggcaatgaattcaagaatgcgtaccctttttatgggagttacaaacatccctatgctgaatgccgatatcgtaacaggagtatccctgatgcttctcttcattgcattccgcttcacacttggattcaaaacaatccttttggcacatattacattcaacataccttatgtcatcttaagtgtaatgccaaaattaaaacagacgaaccgtagaacttatgaagctgcactggaccttggagcttctccggcctatgcattcttcaaagtagtacttccagatattatgcctggaattttctccggtttcctgctttcctttacaatgtctctggatgactttgtgatcacgcatttcacaaaaggtcctggtattgatacactctcaaccaagatttacagtgaagtccgtaaaggaatcaagcctgaaatgtatgcactttcaaccattatgtttgttacagtgctgttacttttgatcctgatcaatatgtcacctgccgaaaagaaaaaagtagtaaaaataaagcgtttcggaaaagcacaaaaatttggaagatttttcttccaacgtctggtacctgttgctatggctgtgcttattatcatcggtggttttatttatggaaagaacgatgttatctcctcacaaggccaggtaattgtttataactggggtgattatattgatcctgatgttattgatatgtttgaagaagaaaccggtattgatgtagtatatgaagaatttgagacaaatgagatcatgtatccaaaaattcagtcgggagcgattgcatacgatgtcgtatgtccatctgattatatgattcagagaatgattgagaataatcttttggaagagattaattatgacaacatcccaaatttgaaatatatcgatcagaaatatatggatcttgccaaaggatttgatcctgataataaatattctgtcccttatctttgggggactgtcggaatcctttataacaagaaaatggtagatgagccaattgacagctggggtgttctgtgggatgaaaaatataaagatagcatccttatgcaggacagtgtaagagatgcctttggtgtcgctttaaaatacctgggctattcattaaattcaacagacttagatgaacttcaggctgccaaaaatctgctgattgaacagaaacctcttgtgcaggcatatgttatcgaccaggtacgtgataaaatgattggaaatgaagcagctctcggagtaatttattctggcgaagcactctactgccagcaggagaatccaaatctcgattacgtgattcctaaggaaggttctaatctttggattgactcctgggttattccaaaaaatgcagaaaataaggaacatgcagaagaattcatcaacttcctctgtagaccggatattgcaaaaatgaattttgaatacatcacttactccatccctaactctgccgggcaggcattgatcgaggatgactacatgagaaacagcacgattgcattccctgatattgatcagttgaaaaactgtgaaacgtttaatttcctcggagatgaaaatgaggcgctgtataacgaattgtggagagaagtgaagtcgaaataaatttgtatttgtctgtctgattctccatattgaagcaaaggatttggtggtgaataaggccgcaaggatgatgctatattgcatcggacaccggcccgctctacctcatccccttgaaagtatgtaacgtaagagccagaacagttaccgtgagtggtgcctgtctggctcttactaacatactgaacaaggtgtattcggaacgctcctgccttacatgtgtcctcaacaatgtagcaccatcctcgcttctttattccaaacagaagtgtttgcttaacgggacgaatctgaaagacttcatacaagttttgatttgttgcacataagtgattgctgtggaacgaattcaacacttgaatacagaattctggacggaagtaaaaaagggaacgctatcgactatatgacacaacttgtgccaatttgtaaattttagtcaatagcgttcccttttcatatcccttctgatttgcatttcgataagaataatctgtatttaaatcatttctgatctgatgaacctgagtgtttggatggactcttgcataagatatgcatttggcgtaagagtgtacgaagacattttgcgcggattgttagaagaagcgagatacaaaccacacacggtgcatatctcgcttctttgttacaatccctcaaaaggctgagggaacgggccctgcatatcgttgcaagagaccgtccaaacacgcccttcttcattcatttaaattttgaaccagccaatattcttattgctaaatacaaatttataccacaaaattcatcttctgatcatcgtactgcacggaaaatccttttccttcgagatactcttctaccacctgatacatctcatcatatcgtccttcgcaggcacaattaccaagtggttcgatccagaaggattgccttccacaagtgtccctgagatgaattcggaaattcagacctttatctttaagaattccatttaattctatcacatcattaaaagatacataactcattttaattctcctcttctttacctaataaaatgtgttgcaattcgttcttctttctccggaagtccaaactgttctttacccaaggcaatactcttcataagaaatgtcatgtttctggcgaggactctcatagtctgctttccttctccatcctgctctgcttctcctgatattcttccatgaatactattccaatactgactggaagcaactggcattccagaaattgtaaagtatttgtttaactcgtcaaatgttgctgaacatccaccgcgccttgcacagacaacacttgctcctactttcatagtcttatcaaatggtgtgctgtagaacaggcggtcaagacaggcgatcaatgttgcatttgcggatgcataatagactggacttgcgataaccagtccgtctgctttctcgaatttcaaagccagttcgttaactacatcatcataaacacatttttgcttggaagcacatcctccacaggcaacacatccacggacaggtttatttccaacaactactgtctctacttctactccattttcctgaaaaatcttttccatttcttttagtcctacactagtatttccgtttgctcttggacttccattaatcataagtactcttaatttttctgccattatttctcctcctacaaacattattgtcttatcttcaaagttctcagatactctttttgttccggcgtgatccgatagctttcgattgccttctggattgtcttattatgtgtccatacgtccatcttctgttcttctagaaatggaagaacctgatcatactttttggcaagtgctgttgcgaaataccatgccctggccatatttacataatactcttctgaacggattgcggcaaccttccccggatattctaacttaaattcttcttccagataatagcgcatcagcatattgattccaaatcggatcgtatatatatgctctgattccagccatcgatctatctttttgatataagaattcagatgattcttcactgttctgacggccagaagatcacaggttgcccagttatctatatggggcagaaagcgctccagttcttctatacagagttcataatctttaatctgctcgatcagaagcccctgcagattattctcttcataatattgatgtggcaggatcttaagaaactgcttcgcctcttctgtcttcccgaatttctttgcataagttcgaagtacagggactctcactcctatcactgattctttctctactgttggcatcagttttgcgtgaaaatcccgatattttagatcctgcattgtaaaaaggtcctgctgcacttttggtattacttcttttggagtcatctttattcacctgctttctgttaatttgcagtataacacacactttatgccactgcaagtatatatagaacaaatgttcttctgtattttatttcttttttttgctatacttatctacgtataaagttgctgctcacacccactatgaacagtaactaaaaattctctgactcttttgctgttactgctcacactatatattaccagcaacacagattcgtcagagaatataagggagataaaaatatgctgacagtaatgaaatttggcggaagctccgtggccgatttggagcacatccgcaacgtagcaaaccgctgtatcgcaaagcagcgcgaaggcagccaggttgttgttgtcctgtctgctatgggaaagactacagataatctgatcgcaacagcaaaacagatcacagagcagccttcccgcagggaattagatatgcttcttacaaccggtgaacaggtttctgtatccttaatggcaatgactctgatttccatgggcgtcagtgcagtgtcactgaatgcatggcaggttccaatgcatacaacttcaaattatcaaaatgcgcgattcaagagaattgattccgagcgtatccgtaaagagcttgatgcgaacaagatcgtcatcgtaaccggattccagggaatcaataagtatgaagatatcacaactcttggccgcggcggctctgacacaacagcggttgctcttgctgctgaactccatgccgatgtctgtgaaatttacacagatgtagacggagtatataccgccgatccacgcgttgttccaaacgctcataaaatgacagagatcacttatgatgagatgcttgagatggcctctcttggtgcgaaagtccttcacagcagatgtgtagaaattgcgaaaaaatacggtgtagaacttctggtatgttctagcttaaaccacaattcaggaacaattgtaagggagaaaacgaaaatggaaaaaatgttaatcagtggtgtggcagccgataaaaatgtagccaaaatccgtgttgccggtctcgggaacgagcctagtagcacattccgtcttttaaatcttttagataagaataaactgaacattgacgtcatgatccagtctcttggtaaagacggtacaaaatctgtatccttcactgttgcaaaatcggacatgctccgtgctttggatctgttaaatgaaagcaaagactatcttggcattaagaaactggattctgatgaaaatgttgccaaagtttctgtcattggtgccggtattcgttctcattcaggtgttgctgcaaagatgttcggtgcactcgcaagtattgatgtcaacacagagatggttactacatctgagattcgcatcactgctctgatcgatgaagcctatgcagatcttgcagtacgtaaactgcatgaaactttctttgattgattctttatacagaataattgaccagctacataatcaacttaatcgattgcaaactataagaatgtaatgtaaaaagtaaagcagaatcaagcgacagtagggattaataattccctgctgccgcttgatttttatcttatttccgttctgaataattacatttgttttttatttttcactgcacattatgcttcttcctctaacggcgtttttccgcgcaaacgtctgtaatagaatcttccttttccaagaagaatcgtaagataacgaagtaccggctctgttgcgatcgcaaatacaacaaaaagcatgatacactttgttgtcattcctctaatcgcaaacagctgattcaaataaatactacagaataataagcctgcaatacatccgccaagaattcctgcacgaagcttattcatcggtgcactgatcttatagaggatcataaatcctacaattgccagaagcatcgttgctgctgttgagatatcctgctctcctactccaaatgtctttccaaagacaaccagtgccccaaccgccaatgcatctgtaagtgctgccgggagtgctttcaggaatacgttcgtcaggaaatgtcctttaatgatattcttgttcggctcaagtgcaaggaagaacgccggaataccgattgtaaacatactgatcaatgatacctgtgatggttccagtggataagtaaacataaatactaccgagaaaagactcagcaggaaagagaatatattcttaaccaggaacaggctcgccgaacgctggatattattgactactcttcttccttctaatacaacctgtggcatacaagagaaatctgactccagaagtacgatttgagaagcctgtgccgctgcctcgcttcctgatgccattgcaatactgcagtctgcatccttcaaagcaaggacatcatttactccgtctcctgtcatagcaactgttttcccagcctctttaagtgcctgaacaaactgtcgtttctggtttggagttacacgtccaaacactgtcttctcaagaatcgctttcttaatatcttcttctgtctcaagacttgatgcatccacataattctcagcatttttaatacctgctgtttttgcaactttggaaactgtaaccggattatctccggaaataactttcacttcaactccctgctctgcaaagtactggaatgtttcttttgccgcctcacggattggattcgcaagtaagatatagcccaacggtgttaccggctctgtcagtgcttttccatcaatctccgctgcataagtaccaaatacaagaacacgggcacctgtagatgcaagctctgtgattttttccttatgttgctcgtaatcatccagaagtacaaattccggcgctccaagaacatatgtcttatcttcaaatgtagcactgctgtactttgtcgcagatgaaaatcctgtcttggaaattgcttttgcgcctgaagaatgtgtaaaatattctttcattgcagccattgtgatattatcgtttgtcatagctgaaacaaaatctccgaccataagacgaagagatcccatcttttccgtatcgtactgctccgttggaataagttcctgtactttcatcgtattttctgtgatcgtaccagtcttatctacacaaagtacatcaacacgcgcaagtgtctcaatacatttcatatcatgaagcaatactttctgctgtgcaagccggattgaactgacagcaagtgcaacgcttgcaagaaggtaaagtccctccggaatcattccgatcacagccgctaccattgacgtaacacttgaatggaatgatgcattctggaataccagagactgtgcaacgagtatgattccaatcggaatgattgccacaccgacgcatttaaccaatttatccagcgagcggatcatctctgactgctcaccattctgcatttcttttgcttccagtgtaagctttgaaatataagaatcttcaccaactttatcaagtcttgcatgacattgaccggaaataataaaacttcctgacatcagctgatctccggcatgttttgtaatctcatcagactcgcctgtcagcagagattcattcacctgtacttcacctgcacaaacctgtgcatctgcacatacctgcgcgccggctttaaatatgacaatatcatcaactaccaactcttctgcatcaatcaacgatcttttaccatctcgcactacagtcgctttcggtgcatttagcatggtcagattatccagcacttttttggcacgcacttcctgtataataccgatcaacgtatttgcaataataaccggaagaaaggtcagatcccggaaggatccaaccagacataacaaaatagccagaacaagaaagattaagttaaagtaagtaaatacattctcatgtataatctctttcgttgtcttcgacggaggatcgacggccctgtttacccagccatgaagtctgtgttcctgcacctgctgtgctgtcaatccgactttataatccggattgtaacgggttgtcggtatccgcttctctatttcttcttcaatctctgttttcttgtttctgcttcttgccatctgttacttcccttctgcttcttccaacgtctccgttctcgtcaaaatctgcataaattcttctcctgtaattgtttctttctcatacaggtattttgcaagctcatgaagtttcttctggtttttctccaaaagttccatcgctgtatcatatccgtgttttacggtatctacaaccatctgatcaatatctgctgctgtctgtggggaacaacttaaactgctgtctcctcccagatatggattgttctgcgtctcaagagcaaccataccaaaccggtcactcattccataacgcgtgatcattgctcttgcaagctttgttgcctgctcgatatcattcgatgcgcctgttgtgatagaattaaaaatcagtttttctgcgcatcttcctccggtcagtgtcgcgatcttgttgatcagctcttcctgtgtcatcagattccgttcttctgattcaacctgcattgtatatcccaaggcacctgatgtacgcggaatgatcgtgatctttgtaaccggtgctgaattcgtctgtaatgctgctaccaacgcatgaccgatttcatgataagaaacaattaatttttccttggaagaaagtacctgattcttcttctgatatccagcgataacagtttcaatactttcttcaagatctgcctgcgttacatatttacgattctctctgactgcgcgcagtgccgcttcatttaccatatttgcaagctctgctcctgatgctcctgatgcagctcttgcgattgcattaaagtcaatgtcatctccaagtcttactttcttcgcgtgaactttcagaatctcttcacgccctttaagatccggaagttccaccggaatacggcggtcaaatcttcccggacggagaagtgccggatcaaggctgtccggtcggttcgtcgcagcaaggatcacaacacccttagatgcatcgaatccatccatctctgtcagcaactggttcaatgtctgctcacgctcatcatttccaccatatcctgcattatctctctttttaccgattgtatcaatctcatcaataaatacaatacaaggtgctttttcattcgcctgtttgaaaagatcacgtactttagaagctcccatgccaacaaacatctctacaaattctgaaccagagattgagaaaaatggtacatttgcctctcctgcaactgcttttgcaagcaaagttttaccggttcccggaggtcctacaagaagtgctcctttcggacatactgcaccgatctccgtatatttctgcgggttatgaagaaaatccacaatctctgtcagcagttccttcgcttcatcttctccggctacatcctggaaagtgattcctgttgtagattccacataaatcttcgcattgctctttccgaactgcatgaacggatttcctgctgcacctccacccatcttggccatcatcttctttgcaagccactgtcctaatgcccagaagatcaaaagtggtaaaatccatacaaggaaaaagctaagaagcggattcatctcctgctgtgcgactcttccgaattcacatcccgcatcttccagacgatttaccagatttggatcatcaaacgttgttgtctcataatatttcggttcctcgctattatctgtaaaataaatagtgtctccattcaactctacttttgatacttcttttccctcgaccatagtaagaaaggttccataatcgacttctttcaccttattctttcctagaatattcggaaaaagaaatgtgttaagaagcacgagaataatcaaagcaatcaaatagtaaaagattaatggcttctttggtttctcaactttcttcatactgttgttcctcctattttctaaattttgcacgaactgcctttatcatctgtataatcggaagattcaatgctgcaagaccatacacagtaagtaactgcgataatgtcagtgtctgcactttaaagatgttatgcagtccaggaacagtcacaacaagcgtgatcagaatcattccaattacaaaagcaccgatcagataaatgttattaaagactctttttgtaaatacaaccggacgatttgatttacagttaaacccatggaacaatcttgaacagcaaagtgttgcaaatgccattgtacttgcaagtagtgcattaccgtctttgtatccaattgtaaatgcaatcatgaccatggtacagattgataatccttccagtccgatattgatcaaaaagtctttcgttaaaatggattcatttatcggtcgtggcttttctttcatcacatttttcgaatgtggttccaatccaagagcaattgccggaagactgtctgtcagcagattaatgaacaacagatgaaccggcgcgaacggtaccggaagtgccatcagtgaagcataaagcactgccaggattgctccaaaatttcccgaaagcagaaactgaatggatgctttaatattgcgatatatatttcttccattctctactgctttaataatagtcgcaaaattgtcatctgtcaaaaccattgctgcagcgtcttttgacacttcgcttccggtaattcccatcgccactcctatgtctgcctgtttcagtgccggagcgtcattcacaccatctcctgtcatggatacaatgtttcctttttcctgccatgcacgcacaatacggatcttgtgttcaggagaaactctggcgtaaacagaaatcccttccacaaagtctttcagttcttcatcggacattttgtcaatctctgcaccctcacaggcttcggattcattttcaagaattccaattctctttgcaatggcagcagctgtcaccttatgatctcctgtaatcataatcggacggattcctgcacatttacactcttctacagcagctcttgactcttctctcggcggatccatcattgcgatcagccccaggaatatcagatgatcttcatcctccagcgtaagttccgtctcatctgatacttctttataagcaaatgcaagaactcgtaatccctctcttgagtatttctgattctgctcttcgattactcttcttgtctcttctgtgatctcatgagtctcccctttcatctcaacccagtctgtccggttcaaaagaacatcaactgctcctttgacaatcatcgttggcactccgtttaatgaatgctttgttgccatcatcttacggtcgctatcgaatggattctcactttctcttggatactttactctgacttcttccgggtcaagaccaagactgcttcctaaattaatcagtgctgtctctgtcgggtctccgatctctacaccatcaatattcgtagagtcattacaaagaatactgctgataaggagtctgctctgagacggatcccggagatcgatcttgtctgcggaaatgctctggccatctacataataatgctctactgtcatcttattctgtgtcagggttccagttttatctgaacagataatggatacacttcccagtccttctactgcctgtagttttcgaacaattgcatgttctttcgccattttctgcgttccaaaagaaagaacaatcgtaacgattgaacttaacgcctccggaattgctgcaacggcaagagcaactgcaaaaagaaatgcatttccaatattctcaccacggaaaacactgattccaaacaaaatcgcacagaatacaagaattaaaatggataatttctgtccaaactgatccaggttcacctgcaatggagtcttcttctcagatgtcgtcttcagaagacttgcaattttaccaacttctgtattcattccaatctctgtaactacaaaagaacctcttccatacgtgagaaagcttccagaatataccatattaatacggtctccaagaggaacttcgtcctgttcaatcacatctgtcgtcttctcaacaccaagactctctcccgtcaatgcactttcgtcaaccttcatgcttgcacattccagaatacgtccatctgcaggaatatagtctcccgcctctaacataataatgtctccaacagtaacttctgaagacggaatcgggacaaccactccatcacgaagaacttttgcttccggaccggataatttcttcagacttgccagagatgactctgcctttactgtctgcacagttcccagaattgcattcattgtgatcacgataacaataacagctgcgctctcaatatctcccataaatcctgatgcgatcgctgctataataaggatgatcaccagaaaatccttatattgctccaaaaaaatctgaaatgttgtcttcttttttccttcagtcagttcattcgggccgtatttcctttgattttcactgatctgttcttttgttaatggttcttccgagccattcacttctcttaaaacttcttctcccgataattgataatatgctttcactgccattcctcctaactgattattggttactattcacacgatgtgcgacccataatcctgattaatctgcagtgcgaataaaaaaagagacaattattgcaccgcttcttgcatgcaataaaagtctcaccatttcatcacgatccggatggacttcttccatcgtattgacgactcgcaaacgctactcaaagcgccagttactcccttttattaaaataaactatactcatttttcctgataatgtcaataaactttattttctttttaggaaatattttcaggattttaacattaaaagatcgcggagcgttttttgcaattaggaaagcactttcctaatatataaaaaggataccttacagacattctatccataaggtatcctttctattctatcaatcgatcaaatgaaaatctcaatctattttcttaaatcctaaacgattccctgagctgtcatagcatctacaaccttctcaaatccggcaatgttagcacctacaacgtagttgcccttgaatccgtatctctcagctgcatcaaccatgttgtggcagatgttaaccatgatgtttttaagtttagcatctacttcttcgaatgtccagctcagacgttcgctgttctgagacatctcaagtgcagatgtagcaacaccaccggcgttagctgctttaccaggtgcaaagataacaccattctcctgcagatactctgtagcttcgagagttgtaggcatgttagcaccttcacatactgcaatacatccgtttgcaacaagtgcttttgcatcttcaaggtgaagctcattctgtgtagcacatggaagagcgatgtcaactttaacattccatactcctcttccttcatggtactctgaattcggacggtacttcttgtactctgtaagtcttgcacggttaacttctttgatttctttaagagctgcaacatcgattccttctggatcgtatacccatcctgtagaatcacttactgtaacaaccttagctccgagttcctgtgctttctcagttgcgtaaattgcaacgttacctgcaccagaaactgcaactgtcttacctgcaagctcaataccattgagtttcagaagttcgtctgtcagatacagaagaccatatcctgtagcctctgtacgagcaagagatccaccataggaaagtccttttcctgtaagaactccttcatatactccacggattctcttgtactgtccgaacatatatccgatctctcttgcgcctgtaccaatatctcctgctggaacatcagtatcagcaccaatatatttgcaaagttctgtcataaagctctggcagaatgccataacttctctgtcagattttcccttaggatcgaaatcagatccacctttacctccaccgattggaagtcctgtaagggagtttttgaaaatctgctcaaaaccgaggaatttgataataccaaggtttacagatggatgaagacgaagacctcccttgtatggtccaatcgcactgctgaactgtacacggtatcctgtgttaacctgtacctgacccttgtcatctacccacggtacacggaacttaatctgtctctcaggctctaccagtctctcaagaagagcttctttacggaatttttcttcatttgcttcaatcacaacacgaagagactccagtacctcttttactgcctgatggaattccggctcagcaggattcttctttacaactaaatcaatcacttcatcaacgtatgacatcttaattacctcctagaataaatagattgggattcgtatctccctgatactattgtatctttcgtcaactaatgtcttttctaaaacaagaaaaacagactgacaagcaatctgttaccccagacaccgttgtctactcgtttattttataagctaaatgaaagattgtcaatcattaattgcattattttaaagttttatcactttaagttgataaaactgcatgaactaatgtatcaaattgcaattttcagcatatttaaggttatatgtcgagtaaacagataggaaaatggtggtttttatgcaagtatagcgctcctttccggtgttcctacacatttccctttttgaaccaggcagctctaaaatgcttcgctttttatcgctgtggcgtatccgccacatagccatagatagacaaagaggcttttatgcaagcataacgcctctttgtctatctatggccgcctgactctgtacgaatatcaaaaaacagagtactgtttccagtactctgtccatttgcacatattagttatatttacgttttctagcagcttcagatttctttttacgtctaacgcttggtttctcgtagtgctctctcttacgaatctcctgctgaataccagcctttgcacagtttctcttgaatctgcgtaaggcgctatctaacgtttcgttttctttaacgattacatttgacatagtctcacacctaacctcccctccagccttgtattgtgcatcatacgactgttcgggtatatttattgcactggatattattataacatattttttcaaaacgtcaactgctttttatgatttttaccgatttttttatactttcttctcgcttctacccaaaagagaatctgccacagacagattctctttacaatgactttatttaatctgatcagccagtgcttcttctgcttttgcaagtgcatccgggattcctgctgggttctttccacctgcctgagccatgttcggacgaccaccgccgcctccgccaacaagacctgcgattgctttcacaagatttccggcatgtgctccctgcttcattgctccgtctgttgctgtagccatcaggcttacttttccgtcatttcctgatgcaagtacaaccacaccttcgccaagcttctctttgagctggtctccaaggtcacgaagtccattcatatcaacaccgtcaagctgtgctgcaagaagcttcacaccttttacttctttcacctggtcaaggatgtctcctgctgcgctctgagccatcttgctcttaagactctcaacttctcccttcagagacttgttctctgcctgaagatgtgtgatcttctctgcaagattctccggagttgcttttacaagctgtgctgcttctttgagaagacgctccatctcagcatagtagttcataagtccttcagatgtcagggcttcaatacgacgaacacctgctgctacaccactctcagaaataatcttcagtgctgtgatctctgatgtattcttaacatgtgtaccaccacagaattcaacggagaatccgctcatatctacgacacgtacaacatcaccgtatttctcaccaaacagagcctgtgctcctgtctttcttgcttcctcgattggaaggttctttgtcacaactgcgagggcatttgtgatctgctcattcacaatttcttcaaccttcttcagttcctcaggtgttactgctgagaaatgtgtaaagtcgaaacgaagtctgtctgcatttacaaaagatcctgcctgctctacatggcttccaagtactgtacgaagtgctttctgaagcagatgtgttgcactgtggtttctttctgtaagtgcacggttctttgcgtcaacttcaagagttaccgcatcaccaatcttgatcattccttttacaacatgtcctacatgtccaacctttgttcctgcaaggtgaatacaatcttctacaacaaactctccatcggctgtacgaatcacacctttatcagcttcctgtccacccattgttgcatagaatggagtctgctcaacgatgattgttcccttttctccatcagaaagtgcatcaacaacttctgtctctgttgtaagagctgtaaccttagaatcaaatgtcagattgtcatatccgacaaattctgtctcaagtgctgcatccagctgatcgtatacagaaacttcttttcctgtataagaatgagttccgaatgttccttctgatttcgcacgctgttcttcctgtgctttcttgaatccttcctcgtcataagtcagccccttttcttccaggatctcacttgtcaggtcgattgggaatccataagtatcataaagcttaaatgcattctctccggaaagaactttctctccattcttctccatctcagtttccatatctgcaaggattgcaagtccctgatcgattgtcttattgaagttcgcttcttctttcgcaattacattaaagataaactctttcttctcttccagctccggatatccatccttggaaccttcaattacagttgttgcaagctttacaaggaatgctccgtcaattccgagcagctttccgtgacggcatgcacgtcttaacagacggcggagaacatatccacgaccgctgttagaaggtaagataccatcagaaaccataaatgttacggaacgaatatggtctgtaacaacacgcagagaaacatctgtctcatgatctattccgtactgcttgccggagaggttacatacatgatctctcagtgctttcattgtatcaatatcaaacatggaatctacatcctgtacgatacaggcaagacgctcaagtcccatacctgtatcaatgttcttctggatcaggtctgtatagttgccgtgtccgtcattgttgaactggctgaatacgttattccagatctccatgtaacggtcgcactcacatcctactgtacatcccggttttccacatccgtatttttctccacggtcatagtagatctcagaacatggaccacatgggcctgaaccgtgctcccagaagttatcttccttaccaaaacggaagatacgctctgccggaattcccatcttcttattccagatttcgaacgcttcatcatcatcttcgtatactgaaggatataatctgttcggatcaagtcccacaacttctgtaaggaactcccaggaccactcgattgcttcattcttgaaataatctccaaaagagaagtttccaagcatctcaaagaatgtaccgtgacgtgctgtcttaccgacattctcgatatctcctgtacgaatacatttctgacatgttgtcactcttcttctcggcgggatctcctgtcctgtgaaatatggtttcagcggagccattcctgaattaatcaggagaagactcttatcattatgtggtactaaagaaaagctcttcattgcaagatgtcccttgctctcaaagaactccaaaaacatttttcttaattggtttactccgtatggctgcatacatccatcctcctctttcgctcataaaaagcctattctgtaatataccacaacagcctccgtttgtaaagcggaggccggttattatccttatatttacttatttcagttcaatttcttccagttctttcggtggaagtgctctgcttgagtttttgacataagctgcgacatccttcttcgcagtcgggattggaatattcgttccagctcctgcaatacatccgccaagacatcccataccctcgatcagacatccgttcattcttccggctttggcaagtgtcaggatcttcttacattctgccagaccttccgcatgctcgatattaacctgcgttccagggtaatactcgttaatacattcttcgattgcctttgcaactcctcctgcacaggcgtatccacgtccggctcctgtcgcatcatggaaagaagactctgcctcataagctgtcagatcaattcccttcgcatcaaacattgcctgcaattcttcaaatgtaacaacgaaatccacatcacttctcacagtacgtctggaagcttccagcttcttcgctgcacaaggtccgataaatacaacctttgcattcggatgttcctgtttgattgttcgtgctgttgcaaccatcggagtcagttcctgtgagatctgatcgatcagatccgggaagaacttcttcgcaagcattgcccaagatggacaacaggatgtcagaagaaatggaagttctccggttgtcactttattcacataatgatgtgcttccgcaattgctccgatatccgctccaagagcaacctcatatgtctctgaaaatccgagttcttcaagagctgctttgaagtttcttacattaatattcggtccaaactgaccaacaaatgccggtgctacctcagccacaatctcttctccttctgaaagtgcacgagccagctggaagatctgagacttgtcagagatcgcaccaaacgggcagcttaccatacacattccgcaggaaacacatttgtcagcatcaatataagcacgtcctaatttatccgatgtaattgcattcactccacaagctttcttgcaaggacgctccttcttggcaatcgcatcgtatggacagacagacttgcactttccacacttgatacatttatcctgatcgataaaggattttccattcaccatggaaatagcgcccctcggacagacttcctgacaaggatgtgcaaggcagcccttacatacattgctgacctcgtatttattctcctcacagctctcgcagcctgacggaatcacctgcatcagcggcggctcataatatttttcagaaatattactggcctcaactcccgctgtcaaatggaccggcttattctccggacgaagggaaagtcccatcgcaagacggagtctttctcttacgactgctcttgcacgataaatgctctcacggtattttacttctgaatcttctcctacgatttcatatggaattgcttccatatctgctaccaatgtctctgcatttgctttaaatccaagcttggcaacttctgtaaatacctgtcttcgaattgcacggaccggtgtctgtaatcctctcatttttgatttcctcctattcttcagttccaaaaactctctgtgcataatgaaccgactgcatggcatctttgccatagaaatcagctcctatcatatctgcgtagtcctgattcagtacagcgcctcctaccatcacaagacaatgcggagctttctctctaagctgtctgatcgtctcttccatacttacgacagttgttgtcatcaaagcacttaatcctaccagatgaatatcctgttcaagtactgtgtcaacaattgtctccggcggaacatcctttccaagatcgatcacatcaaagctatagttttcaagcagaaccttcacgatatttttaccgatatcatggatatccccttttactgtagcaagaatgatctttcctttcttctcctgaacttctccgctgctatccattttctctttaagcaccgcaaatgctgtcttggccgcttcagcactcatcagtagctgaggcaaaaagactgttcccttctcaaatccttcacctaccgtattcagtgccgggatcagctcttcgttaatgatctccagaccatctttctcctgaatcatctcagatgtaatgctgttcgcctcttcacgaagccctctttcaattgcacttttcagtgtcatcttgtgagctgaacctgttgcggaaaccggagctgttcccggctgctgtgcatatttattaatataattctcacagttgctgtccagattcattaacgcatggtatgcataccatgccttcatcatatcctccgagttcggattgataattccaacgctcagaccattctgcattgccatcgtataaaagatggagtttacaatcggtctgcttgggagaccgaaagaaatatttgatacaccaagcacagtacacacaccaacttcgtcacgaagtctgcgaagtgtctcaagtgtcacctttgctccttccggttctgaactgatcgtcattgccagggcatcaattacaatatctttcttctcgataccgtattttgctgcctctgcgataatcttcttcgcaatctgtacacgtccctcggctgttgccgggattccgtcttcatcaagtgccaggccgatcacaacaccgccatacttccggatcagtgggaatactgcatccattgactcctgctttccactgactgaattgaccatcgccttaccattgtaaatgcgaagtgcattctccatcgcaaccgtatcaaccgtatcaatctgaagcggaagattcgtcacactctgaagttcctgaacaactttcttcatcaatgtcggctcgtcaatatccggaagtcctacgttaacatccagaatatgtgcaccgttatcctgctgtgcaattccttcttttaaaatataatcaagatcatgttccttaagcgcctgtttaaagcgtttctttccggttggattaatacgctcaccaataatctttgatccggttccaaggaacacactctgtccataagaagatactacagtataacttttcttctcaatcggcttcaccggaatgtctttacactgcttcaccatctctgcaatatgtgcaggagttgttccgcagcatcccccgatcacaactgccccaagatcaacaacatgacgcataacagaagcaaattcttccggagaaacatcgtaataagtttctccgtctttctgcttaggaagacctgcattcggtttgacgatcacaggcacagaagagtacttcatgatctgctccaggatcggcagcatctgctccggtcccattccacagttgattccaagggcatcgatccttaatccttcaagcattgccacaacagacggaacatctgctccggtcagaagctttccacgctcgtcaaaaatcgtcgtagcgaaaaccggaagagatgtattctctttcgccgcaagtactgctgccttcagttcataagtgtcactcatggtctcaatatggatcagatccgcaccggctttctctccgaggatcataacttctttgaatgtctcatatgctgtctcgaagtccagatcacccatcggttttaaaagctttcctgtcggtccgacatccagtgctgtgtagattcttcttccaccacttgcctcttcagccgcatccttcacatgcctgatcgcaagacggataatttcttccaatggaaaatcatcgcaatggaatttcaatgcattcgctccaaatgtgtttgcaagtacaatatcacttcctgctgaaatatattgtttgtgaatgtttttgatctcatccgcatgtgtaacgttccacgtctccggtaactctcccggctgaagtccctttgcctgaagcaaggttcccattccgccgtcaaaatataataactcttttcccaggcgttctcgtatcatcttcttgtatcaatccttcctctcttatctcttgcttatcgtcggtattcacaatctttttttgtacagacctcacatcctgagattggacatctgtccttctgtgtactgattccaattactgctgttaccgactttgttggtgtcatcataaagctgtctgtcaaagtcaacccgattgtctttgcacaattcaacattcgtacgactggttcctgataacagatatcaaaatctccatatccgggactgaatctcggtcttaaatacaaatgttcttcttcaagctctgccgcaatcttcttctgacactcatcacaatattcttctaacattgctgctgcacaagactgcaaaataactgctcttgccatatctgtcaaagaaatcctgcgcatcagccggtcaactccggcgccaagtgttgctccaaaaagaacaacctgacggcatcctttcagatttctactcaggctcttacttcgaatctccatctgtccaataaccagtcttccgtcatctgtatgattcagatcaaaaatttggcagatggacttaggccctgcttcctgttccaggtctttgaaagactgttggatcagttccaaggttcgttcatctgcctcattttttccaaatcccagataacgaactgcttcacgtactctcttctctgtctctatcatctggtcattcactttcttaacacttgataatctcggaaagattattcataatcgcaattgcgatctctggcttattcatagaataaatatgaatattattcacaccgttcgcaagaaggtcaataatctgatctgtcgcataagcaattcccgcctgcttcatcgcctccggagaacttccgaagcgatctaatattgcaagaaatcttctcggaaatactgttccggaaagttcctggcttcgcttcatctgagcagcactggtaatcggcatgattcccggcagaaccggaactgtgatccctgcttctctgattctgtacaggaaattataatggatatcattatcaaagaacatctgtgttgtaaggaaatcaactccactgtctaccttctgtttcagataacggatatcatcctctttatgttcctgctccacatgtccttccggataacatgctgcaccaatacagaaatccccatgtttcttgatttcctgtaccagttcataagcataatggaatcgatctccatcagggaatgtcatgccttccggaatatctcctcgtaaagcgagaatattctcgattccatgagccttcaggttttcaatcacctctccaacttcttcttttgtggatgaagcacatgtcagatgtgcaagactcatcactccaagatcgtccttaatatgggatgcgatcttcgctgtgttcttgcttgttccgccaccggctccataggttacgctgatataagatgggttcagtttggcaatctcatctgttgctgataatactttgtcaaatcctgcatctgtcttcggcggaaacacctcaaaagaaatgtggatgcctttctggttcagtttgtcaataattttcatcgggtctgttactccttgctcttgtgttactcttgtattacttctttgttacttcttataattcttattctccgatcagacttctgtacagatcttcatactgtcttgcagaattcatccatgagaaatcctgagtcatcgcgcgctcgatcatcttgttccagtcacgtttcttatcataatagattctttctgcataacgtacagtgttcaacatctcatgtgcattataattagagaaactgaatcctgtacctgtcttctcaaactcattgtacggttctacagtatctttcaatcctcctgtctcacgaacgatcggaagtgttccgtatctcagactcatcagctggctgagtccgcatggctcgaataaggatggcataaggaatgcatcacatccggcataaagtctgtgagaaagatcatcggaatagaaaatattcgctgaaacctttcctgcatacttccatgcaaagtgacggaacatattctcatatttcggatctcctgttccaagtactgcaatctgcactgcatcctgacacatctcatccatcatataatcgatcagatcaaatcctttctggtctgtcagacgggaaacgattccgatcaacattacatgattgtctttatccagtccaagttcttcctgaagagcggccttattcaccggtttgtttttccggaaattctcaacattaaatgtctttgcgattctatgatctgtatccggattccagtcattgtaatccagaccattcacaataccgcaaagatcatttgatcttgctgccatcagtccgtcaagaccttctccatagaacggtgtcttgatctcttctgcatagctgtggcttactgttgtcaccttatctgcataaacaataccgcctttgagcatattagcatctttgtatgcctcaagcttatccggaacgaaataataatccggaagtcctgtaattccctgtacagtctttgtatcccataccccctggaacttcaggttatgtattgtcataactgtcttgattcctctgtaatattctccaaagaagcggaaattatccagatataccggaatcagacctgtctgccagtcatgacagtgaatcagatccggacggaacccaatgaccggaagaatacttaaaactgccttacagaagaaagagaatttttcaatattccacttcggatctccatcatatggagcaaatcctgaaaaataaaattcattatcaatgaaataaaatgtaactccatttaattctgtcttaaagattccgacatagcgattctctcctgcaaaatccatgtagaagtttgtgatatactccaagcgctctacccactcctgtttcatacacatgtacttaggtaaaactacacggcagtcatatttctctttatcaaaatcttttggaagtgaacctacaacgtcagcaagacccccggtctttataaatggtacacattctgatgaagcgaacaaaatgtttttcatacttagatcctccactttcacttgccctctttcggcaattacttataaaatattataccgcatttttatcataatgcaaaggatttctcattgtattttacttcttatttcccatgcctgtattccaattgtattgtatctgcgatcaaagcaataaattcagaatttgtcggtttcccttttccattgcttactgtatacccaaaaagttcatccagagtgtccagctttcctctgctccatgccacttcaatcgcatgtcggatcgcacgttctactctgcttgatgttgtctgatacttctttgcaacggttggatacaggatctttgtgatcgcattgagcacatccatatcatctaccgccatcataatcgcatctctcagataatgataccccttaatatgagccggtattccgatctcatgcagcatatttgtcactcgtgtctccagactttctcctctgttatcagatgccgcctcagagcttcttgtttccataccgtgtgacatccgccccgcacttcggattcgttctaacaacatctcattttgaaacggtttcatcatatagtaatttgcacctttattaaaagcatcttctgtaatcttttcttgcccaactgctgtgattacgataaaatacggatgcttgctgacagttttgtcatgattgatccgatccatgaccgtcaatccatccattttcggcataatcaggtcgagaagaacaacatccggctgtttatctttgatgatctgacacatctcttcaccatttttcgcctttccgaccagattcatgtctttttccatcccgatcacacgatccaaaagatccaaaattttctggttatcatcagcaatggctattttcaaatgttccatcttcttctctcctttttctgagaacgtttgtcttgttacaccactcgtgtattatattccagcttttttgtcgtattcaagaaaatcttgcagtagtatttcgacatccttttcgacccttttcacgattcttcctctttcaacatattttcaataaaaataccgtatccttttgtcgaatcctgtacaaacacatgtgtcacagctccgatcagttttccattctgaataatgggactcccgctcatcccctgaataatgccccctgtcttttccagcaattccgtatctgtcacctgaattaccattcctttgttcacctggtcggattctttgtcaatttgtgttatacagattgtgtattctttcacctcaccatcaatgtagcagcgaatccttgcctcccccgtctttatttcctctttttttgctacctgtatcggaacttcctctcctatccagcttctgtctgaatttaattctccataaatacctgcatccgtatttttctcgatcactccaagccgatgaaaccgattataaacaataatcccttccattgttccgggattccctttgcttcccttttgcactttctgaatactggttctataaagcgttcctcttttgatcgtaagaagtgtacttgtatcaatatcatgaataccatgtcccagtgctgcgaacctgttattttttgtcaaaaatgtgattgtcccaagcccctgtacattatctctcacccagattccaagtcgataatttccttttgaaatctgcacaggagtcaatttcttttctaatatcgtattttcacgtctgactgtcagaaggaccttctctccatccagatgttccaccagatccatcaactgttttttcccctcaatcttctggtgattcacttccgtaatataatcaccggaactcactacaccctgtgcaggtgtatattccttcccatccatccccgtcattttctccgtgtctaaaaccagtacaccatccgtttccatataaattccaaccggcattcctccaagtagaaccgtatcgtcttccttttccgcagccagactttccacttcccggccactgacttccgtattttccataaatcctgtagtctgtgcacagccacatagcatcaataagcagaacataaacaacagacctgtcctgctcatattccttttcctgcgttctttcatgatccacactcctctcttgcaaatattaaaagcagatgctgtttgcatctgctcttagtatgtgtggatcttcttcttttcacactggtattatttttctctttttgccagttctttcatttctctggcactgtctatgattccatctgtcacatttgctcccccaagaagtcttgcaagctctgcaacagagtcttcctgatcaagtctctcgatctgtgttctcacagaattatcttctgcctctttatgaatgcaaaaatgaatatctgctgccgctgcgatctgtgaaagatgtgtaatacaaattacctgacggctctttccgatcaactgcagtctctctccgacacgacctgctgtgattcctgatattccactatcaatctcatcaaatatcaaagtcggtgtatcttcttcatctgcaagtacggtcttgattgcaagcataatacgggatagctctcctccggatgcgacatcccccagtggacgcacaggttctcccggattaaccgacagataaaactctgcatcatcttttccttgtgcagaataactttttgcttctgtcaaacgaatttcaaaacgtgcatccatgaaattcagttccgacatctgatgaacaatttcctcggcaaatttaactgcgttttgttcacgcacttcatgcagttccatcgcagccttttccatctgcttttctgcctttttctgtttctccaaaagttcctgcataaaagaatcgtaatcttccagttccgatagtctctgtcttttttcctcacaatatgcaaggatatcactgacagtgtttccatattttgcctttaaatgattcacttcattcaggcgggactcaacttctgaaaactcttcttccgaatattcaaaactctttgcatattctgccagatcccggttgaaatcattcagcagactatcgatctccacgatctgatcataaagctggcttcccttttcatcaaaagatgctgcttcctgaagacttcggattgcacggcttaagtaatcacttgcatttccacgttcgtcctctgcagtatactgatacgcttctgcaactccttctgtgagttttctgctatctgtcatcttgcgatactgttcttctaaaagttcatcttcaccttctttaagagctgcttcttcaatctcattcacttcaaattcagcaagagaaagttctcttcttcggctctcttcatccagcgaagattgttccaccttcttacatactgccttccattcctgatagcaggaagccattttttcttttaacggatccgtctgttctttcccataaagatcaagcagtgttaaatgattctttcgatgaagcaatgtctgattatcatgctgtccatgaatatcgatcaaaagactggctacatctttaaggacgctcatattcactgtctcaccgttaatcttactgacacttcggccttctaaaaggcggcggctcaatgtcagatatccgtcttccggataaatatccaaggcctccagcttctttaaaatcttttcttctttgatgtgaaaagtaagttctaccaatccgctttttgccccgtttcgaagcatctgtgcattgtattttccacccagtgcaagagtaacagagccaagaaggattgactttcctgctccggtttcaccggtcagaatattcaatccttccccaaactctacctctgtttcatcaatcaaagcaagatttttcacatacagattctgtaacatatatcacctatgctttccttgaaaccaatttccttatattctccattactacagctgtatcttcaactgtacgaattgcgcacatgatcgtgtcatctcccgcaatacatccgaccacttcattccatttcattgcatctactgcagcagcaaccgccattgccattccggcaactgttttgatcacaaggatattctgtgccatatccatggaaacaaacccgtcacgaagcacacggatatatttttcgttcattccgtcatcttcctgtctatggacaatatacttctgacgcccaccgtttacagacaactttgtcagcttcagatctctgatatctctggagacagttgcctgtgtgaccttgaagccggcattattcagatattctgccagttcctcctgcgtctctatgtcatactgactgatcaattcaattatctttgcatgtcggctcactttcatagtatcaatttcctttcatcttctcgcgcattgttatcataaaactttcttcacttaattttacaagatgcgctttggcatctgattttctgatcttcactctgtctccgctaaccaattgtctctgtacagcgccgtcataacataaagctactttctcctgccttccataacggccctcgcaaatctcaacttcaacatcatcctctgctgaaagcaccacactgctcgtgttaagtgcatgggaacagattggagtgataactatcagacttgctgttggctctaccaccggcccacctgcggaaagattatatcctgtacttcccgtcggtgtacagatgatcacaccgtctgcctgatatgtattcaacaatgttccattcacatatacattaaactgaacaatacgaagattcccttctcttgtcagaacgatatcatttaccgccagatctttttcaccggatgacattgtcccctccaacatcatacgtttctcaactttaggctcttcctcgcaaagcctgtcaatcgcagatttataatctttcaattctacatctgccaaatatcccaacgttccgatattgattccaagaagcggaagtttatttccttcaaggtcacgtattgcacggatcagagttccatccccacctaaaaccagtccgcaatcaacgttctccggaatcgttcccggaacaataaatccttcctcgtccttttgcgcaagaataacatatttgccttttctctcaatataatcttttatctcaatcgtaacagaataatctctgtcttttaattgatttgttatgatataaaaagattccataccatcacctttttactttgccagagcagcgaatgcttcatccactacctgatccagttcctttgtctcaatctttgcttcctcttccggacatttcttcaaatgtacaaggtattcgatatttccttctggtcccttgattggagagaatgtgatctcaagtacagaaaatccgattgataccgcaaattctgtcactttctcgattacttcatgatgtgtactcttttctcgcacaacacctttctttccaaccttctcacgtcctgcttcaaactgtggtttaatcaatgctacaatctctccatcatctgtcagatacgctctgattgcaccaagcacttttgtgagagagataaacgaaacatcaatcgacgaaaaatcaacaggttctccaagatcttccggagtcacataacggatattcgtcttctccatacataccaccctcggatcctgacgcagcttccaatccagctgtcctcttcccacatcgatggcaaatactttctttgctccattctgaagcatacagtctgtgaatccgccagtggaagatcctacatctgtacagacctttccatctactgtcacatggaattctttcattgctttctcaagcttaagacctccacggctcacataggggagaacatgtccgcgtacctcaatatttacctcctctggaaatgttgttccggccttatcttctctctgaccttctacaaatacatttcctgacataataattgcttttgctttttctctggaatccgccagatttctctttacaagcaatacatccaaacgttctttcatgttacttttcttcctttattctctgatcatctgcaatgaccttttttacaatactctctctgtcgagaccaacttcttttcttaagacatctacatttccatgttcaacataatcatctgaaataccgattgtgcaaactttcaatgggataccctcgcgcatcacaaaatcttctacctgctcaccaaatccacctgtaagcacattttcctcaattgtcacaaggatcctgtgattttctgaaatcttccggatcctctctgtatccagaggtttcacaaatcttgcattgatcagactacactgataccctgctgccttaagatcctcacgcacctgttctgcaaggaaagacatatgtccgacaaacattaccgcgatctcactctcttcatatagaagttcgctctttccatattcgatcggagcacggaattccttcagtccttcatatgcttctcctcttggataacgaagtgcaatcggatactggaaatctactgcaaagcgcaccatatccgccatctcccaacggttctttggtgacaggattgaaagattcgggatcaatgataaaaatgataaatcaaagactccctgatgtgtctctccgtcacttccaacaagacctgcgcggtctactgcgatcacaaccggcagattctgaagacagacatcatgaatcgtctggtcaaacgctctctgtaagaaagatgaatacaccgcaaaaacaggcttcattcccccagcagcaagtcctgctgcaaatgtcatcgcatgctcttctgcaattcctacatcaaagaatctttccggaaatagctttgcgaatctggaaagtccggttccgtctgccatcgctgcagtaatagctacaaccttcttgtccttctttccgatatctgcaagcactttggaaaaaatatctgtataagaatccttccccgaccctccgatcgtttctcctgttgtcacatcaaaaggtcccgttccatggaattttgacggattcgtctctgccggaagataaccttttcccttctttgtcacaacatgtacaagaactgcatgatttacccgttttgcttcattcaatgtctttgttaatgtcttcagatcatgtccgtctacaggacccagatatgtgattcccatatcctcaaaaaacattcccggaacaaataattgtttgatcccgctcttcgtcttcttcacctgatggacgatccgttctcccctgccgggaatcctcttgatcgtatcttcgacacctctcttcaggtctgagtatacctgtgtcgtccgaagcccattcaggtaatttgacataccaccaacattcttggaaatggacatcgtattatcattgagtacaatgataaaattacttttcaatctggaagcgttattcaatgcttcatatgccataccgccggtcatagaaccatctccgatcacagatacaacgttataatgctcctgttgaagctctcttgcggccacataaccaagccctgctgagattgaagttgaactgtgtcctgtatcaaacgcatcacatttgctttcttttctcttagggaatccactcattcctccgtatttcctaagatcatcaaatccttcttttcttcctgtcagaagcttgtgtgtataagactgatgtcccacatcccagatcagtttatcctctgggaaatgaagtactttatgtaatgccatcgtaagctcaacaactccgagattggatgccagatgtcctccggtcacactgatcttttcgatcagaaaccgccggatctcatccgataattctttcagctcttcctctgtcagttcttttatatcgttggccttttgaatcttttcaagtgccataagttcctcctcaccgacaatcttatttttctctatatacaagagatttcaaaagctgctcaaggaaattatccccggcagggaactttttcagttcatcgattgcttcttctgtcatacgttccacatctttatgagcctgttcgattcctttaagtgttacatatgttgtcttttcattcttctcatcactatgtaccggcttgcccagctgctctgtcgtgcttgtcacatccagaatatcgtcctggatctggaatgccattccgatctttcctgcgattttctgcatactctttacatcttcttttgatgctcccgcaaggattgctccaatcatcatagcagactcgatcagtgcacctgtcttcagtctgaaaataaaatcaagaacatcctcatcaatctgatgtccggattctttcacatctacaacctgtccaccgatcataccatagattccggcctttcttgccagaactctcatcgcttgtccgattctaaggctttcctccggaaattgctcaaacgccttgcatgctgtctcaaatgcatagtttaaaagtgcatcacccgcaaggattcccatatcctctccataaacgatatgtgtcgtctttcttcctctacggtactcatcattatccattgccgggagatcatcatgaaccagtgaataggtatggatcatttccattgctgccataaacggataaatcacttctgtctctccaccaaacagacggtatgtttccatcatcagcattgggcgaaggcgcttacctcctgccatcagactgtattccattgcttccatgatcacactctgatatccgtttgcttccggaagatattctctgagtatcgcttcaattttttctactttttctttctgttcttctttaaaattcatgactctctccattctcatccaaggcaagaactttcttttccacatcgttaattgtacgattacaacacttcacaagttccatgccttcctgatataaattaaaagaatcttcaagagaaagctcctctccttccagtccgccaatgacgcgatccagtctctcaaataactcctcaagacttgcagcctgttctatcttcttcgtgtctttcatcatttcctcccggttactgtttatgggaactttgtcctctttccccttctagttttacagtgtctgtaacgtaagtctcaatctgtccatccgttacataaatctgcaacaaatctccttctcttacctgatctgttttctttatattctgtccttgtgcattgcagacataagaatatccctgacttaatttctcaagtggagacaatcccttcatccgttctgcacaaagtgcgagtctgtgcttttcttttgtcagatgccgctccataagcgagcgcagtgtattctcagcgtcaaccgttctttgtctcttctcattgagtttctgtcttggatggagtgtctgaagtttcaatctgctgtgttccaaatgcacacgctcgtttagcagcttctgatttattgctcttcgaagtaaactctcacaattaagaatctgttccttcacttcggaatattcatacactgcaagctctgccgctgcagatggtgtcggtgctctcagatctgccacataatcggcaatcgttgtatctgtctcatgtccgactgcagagatcaccggaacgcgacagtcaaaaatcgcacgtgcaacagcctcctcattgaatgcccacagatcttcaatgcttcctccgcctcttccgacgatcatgacatccacctgcttctcttccagcatacggattcctttcacgatgctgctcacggcaccatcaccctgtaccagtgcaggataaagcaggatctggacaaatggattccttctctttgccacattgatgatatctctgatcgctgctcctgtcggtgcggtcacaaccccgatcgtacgtgcatagcgtggaatcggctgtttgtactctgctgcaaacattcccatctcttcgagttctttcttcagtgcctcgaatctttcatacaaaagtcccgcaccgtccagaatgatctctcttgcgtacagctgatactttccatcccgctcatagacactgaccgcccccagcactactacctgctgtccttcctccatatgaaaagaaagcccagaccttgagcctgcgaacatcacgcaggctatcgtgccggactcgtctttcaatgaaaaatatatatgccctgatgtgtggtactttaaattagacacctcaccctttacatagattcggttcagcatgaagtcctgggtgaacatattcttaatataagaattaacctgcttcaccgtatagacatttttcattctttcgtctcttccagtgaacgcgcaatcttgccaagtactccgttaataaatgacggagcctcatctgaactgaacatctttgccagttctactgcctcgttaatcgcaactcctaccggtacctcgtcatcccacttcatctcatataccgcaagtctcagaatggacagatctactttgttcattcttgtcgtcttccatccctttgcattcgcattgatcagttcatcaatctcttctgtcttctcaagtactgccgcatattttctcttaatatattctttatccttatccgctgcatcttccaatgtagaaaaatagtattcaatctgctccggcatctcctgcggatcattaaattctatctgaaacaacatcttgaaaatgtgctcgcgaagttcttttctaaccatgttggctgattcctttcctgttcgcttttattcctgactctccatctcgactcctgcaaccttaatgttcacatcagccacttcaagtcctgtcatattctcaattgcattcttaactttctcctgcactcttgcagacacctcaacgatgctgtaattgtacttcaggttcaatgccaaggatacagtcacaataccttccagtacatcaaccttcacacctttggaaagattcttcattccgagctttccgatcagttcattcgtgatgtttccggccatagaagcaacaccttccacttctgtggcagcaagcgctgcaatgattgctacaacttcatctgcaatcttaatctcacctttgcttgcgtcgttctgtattgtataaatatttctttcgtcctttgccataatcaaaacctcctgttttgtctgattctttctacattatatcaaaaatctttctatttgaaaagatttttatgaacgtccgaattctgacaaaataagtccttcatttctctcttctgtcatacggatactccactcatgcgcaaagagaagaagcggacgtcccttcagatccatgatcttcttcatatcagatgttccgctcaagcgatccatatcgatctcttcattctcaatccaacggatgtactcatatggcagattctccagacggatctctacattatattcattctggagacgatacttcaatacatcaaactgaagtacacctacaacacctacgataatctcttccatacccgtgttgaattcctggaaaatctggatcgcaccttcctgtgcaatctgattgattccctttacaaactgctttctcttcatcgtatcaacctgacggacacgtgcaaagtgctccggtgcaaaggtcgggattccttcgtaagcaaatttctcttttgatgttgtcaatgtatctccgattgaaaagatacccgggtcaaatactccgatgatatctccgccgtaagccttatcgatcatctttctttcacttgccatcatctgctgcggctgggaaagacgcacatcctttcctccctgcacatgataaacactcataccggcctcgaattctccggaacagattctcatgaatgcgattctgtctctgtgggctttgttcatattcgcctggatcttaaatacaaatgctgagaagtctttttctgtcattggatcaatctcgccatgatctgattttctcggaagcggagaggttgtcatcttcaggaaatgcttcaggaaagtctctacaccaaagttggtaagagcggatccgaaaaataccggtgaaagctgtcccttatcaaccagttcctgatcaaactcagctgctgctccgtccagaagttcaatctcatctgcaagaatgtcttttgcatctgctccgatcagttcttctgtctccggtgcatcgatcggtactgtcttcacctcacccatcgcagtaccttttttcgtatctgagaacagctcaacttcacgttttgctctgtcgtaaactcccttgaattccttaccggaaccgattggccagttgatcggacaagttgcgattccaagctctttctctatatcatctagcaattcaaatgtatccttcgcctcacggtcgagcttattgataaatgtaaagatcgggatgtgacgcatcacacagactttaaacagctttcttgtctgcgcctcaacacccttggatgcatcgataaccataactgcggaatccgctgccatcaaagtacggtatgtatcctctgagaagtcctgatgtcccggtgtatccagaatattaatacagtatccaccatatttgaactgaagtacagaagaagttacagaaatacctctctccttctcaatctccatccagtcggaaaccgcatgcttcgcagttgcttttcccttaacagatcctgcctggttgatggctcctccgtacagaaggaatttctctgtcaatgttgtcttaccggcatccggatgggatataatggcaaatgttcttcttttctttatctcattcgtaatttctgacatttctaatctcctatcattttcacgcaatagataactgtccgcaggcatcccgtagacagttacataataaaccagtaaatagtgtatcacaagtcctctctgacagcaaatcttttataaaaagtttttccaaaaatatactttctattcatgaattggtgtaattacaatcttctccggctttacatccgactttcttgtcacaatatcctcaatctgggcacggtttgcatccgtaagctcctctgcatttacaacaacatctgcactatcttcccccagacttactactgcctctgaaaatccttttgttgccatcaatgtctcaatttccatctccgtctctgattgctttgtaagctccaccatctgtgcaactgcatctgacttttcctcttcactgagctctgtattgtctatgatcgactgcagtgtttctttattctgggcacgcacctgttctcttgtaacttttgcctgggctaccgtagtctgggctgaaccatttgtgagaaccgcctctccaggtgttccttctgtttcagaatcattactttcaatttctttgcttcctgcttctgtatcttcctgtgaaatatctaaaagttcctggtttgtaagatctgcattagcttcttttgttcctttcgcattctcgccaaacagacgtcccgtgtagttcagatatcctgctgccgcgatcataaccgcaagtgccacaatgatcaactggtttttcttcactttccctttcattaagataaacctccttttatgtaggcgcacgtttcattatttttatcttatgcgcttctacaccaaataatgcctgcaccgcttctgtcagattcttcgcgacaactgcattcccacctccatctgctattacaagaattccctccacttccggtgcattttctttacttacatatgggacctgcgttccgtctgtcccctgactgtacacggtcgttttatccagagatttctcttcactttctcttgtctctccttggctgtctgcttccttcgtcgtctgatgtgtgctttgctgatctttttcaaccaccttctgtcctgtagactttaatgtgatcatcaccgtcacctttcccgccccatctacgacaccaagtgtctgcgctgtcttctgttccagatatttttcatagtctgtcatggaatctgtctcatacgtctctcctttcccggattccccgtcaatctttgtatccttatccacctcccctgtcttcggaaccggaaccgcaactacaagaagcagcagtccacacaggaataaaatggctaatcttgttcttttctgaccacgatccgcctgttttatcttccttgtgtatcccacgatcctttctttccactcctgccaattattgtccaattccgatttcctcccgttttatagaatccgacatccgctctatttctttctcatattgctgatacacttccctttgataaaactgctctgctttcagtcctttcaacgccgcaacaggggatagtgcaagcaggatcaggacaagtccacagaaaaaacgaatatatttttcataatcctttcccggaatcacctgcagaactgcactcataacgagaagcattgaaatgattttttgtatccattgtgtaagcatccggcagattcctcctctctcctctgaaaccttaagatgttacagccaccacaagtgcaatgcttaagacaaacaacagtgtcgtggatgctattaccttcaccataagctgataaccggaactaactccagatatgcatgttgtaattctccggtcagaaaccggttggactaatgccgccacaagttggtacaaaaatgccaatatcagaaattccaccagtggaataagtgccaggacagctataaaaatcattcctgctacaccgattccattcttaagcagtactgcaactcctaatgcaacatccattgtacctccggcaacatctccgatccacggaaccgcctccagtgttcgtcctgcagcagtcattttcaaagaatcaattgccggattcaaaaatccccggatcagactgatcccactcacagcggcaatcatacttttcagactccattggatacatttttccagaagttctgcaaattctgagaaaagatcttctccggtcaggcaggataagaccctcaccatcccgtagatcttcacagccggtaaaagaaagtgaagtacaagcagttccaccagatagatcaggaacagtattgtattataaaacatcaacgccgaactgctctttccggtaaatgcaaccgccagaaagaaacttgggcaaaacacctgcatcaattggacaagctctcctgttttttcttcggcatataaattcatcgattgatatgcttccagacagattgcgatcacaacaagatacaaaatataaaaacccgcttccgctgtctgtctgttttgaaagatacttgtaaaattcgagaaaaatgcagccgccactgtaatcagcagcaggcgcgccagattcttccttcctttctgaaaaacagagaacacctgtcctgaaaaaaactcaagaaatctttctcccaattccttcgtatttccgctgatcagcatctctgtaagatcacgaaaccgaactttttctcccagttctgtctctcctgataactgatcgatctgtctgaaatcaaattcatccagcagactttcttccatttgttccagctcatcctccaacatcccggaatgatcttctgtttccttttcctccgctgtaccatgctctgctgcatacacgctgccacatcctgtcacaaccgtaaataaaaacacaaaacagaagagctttttccaaaaatatttttcccttttcatatcagaaaatctccgattagttccagcagcgcaagaagtaccggcattcctatcgcaaggatcgtcaactttgtaaaaatctcaatctgtacagcaatattctgataccctgcatctttacagattccggatgcaaattcagccacataagtcacaccggccattttcaacagaatactcatctgtccggcatccagttttatataatctgcaattttctttactgtctgcacaaagatttcaagtcgtgaaagcatacaaagaaataaaaacaggctgactgcaagacttacataaatgccatattcacttttcccacttttaaactgcaaagcaagtaatgttcccacgacacccaaaagtgcgatttgtatactgttcaattctgttccgccctccttaaagagaaaacaattgccggatcgaagaaaataagtcataaatcgccgggagaacccaggataatacaagaatcagccctgcaagacttgtcaggaatgcctgttcctctctgccgctatgcttcaaaacctgactcagaatagatacaagaattcccaccgccgcaattttaaatatcagattgatgctcacattctccctcctctcccttttgttcccgcccttttaaagcagaaggatcacaagaaaaatcccgcctgctgcccccagccagctaccgagctttttcttctcagacgtttccgcagttctcttttcaatttccatatccagccttttcaaatgatactccagcagacgaactacaccttctctgtctcctatttcaagcagttccccaggttcgcagatcagaggattcattttccctctccatttcagttccggaagatcttttcctatcgtatctgtccacaagtcagcaaaccgcttttcctgtgtgccctgacattgaaatgccagatccatcagccagttttcataaggttccttctctcttgatgcaatattataaaaaatttccgaaagcggaagtcctgcatacagtaattcgccttttatttgttctataattctgcgaaaatgactcaattcttccagataattccgaagttcttttccatacatccatcctgctccggtcgtcgccaacaagatcagaaaacatccgactaatttctgcacagcacacgcccccgctcatcatagatttcccggatcttgccaggaccgtgatcctgtccaagcacaacataacgctgaaacattcttctgcggatcaggtcacccaggatcggctttttagaagcctcatccatatcaaggctgtgtacactcgcgatcagccggcagccgcactgcatggcatattcaatggcatggatatcctcacttgtaccgatctcatccactgcgatcacacgcggcgccatagaacggatcaacatgatcatcccctccgctttcggacaacagtctaaaatatcagtccttgtacccagatgattctgcgcgattccaagataacacccaccaagctccgatctttcatctaccacaccgacagaacacccttttatgtattcatttccatccgatatctgacggatcagatcacggatcaaagtagtctttccgcaacacggcggagaaatgatcaatgtatggcaaatctgtttattttccgtaatatatggaatcaatgcgtcagcacacccaagtacttcgtgagaaattcttacatttagcgaagaaatatactgtatattttttactttttcattttctataattacttttcctgccaccccgaccctgtgacctccttccactgtaataaatccctgtttcaactcattttcatatgcatagagcgaataatgacaaatatatcccattgtctcaccaatatcttctttcgtaaccagatacgggtgtaccgggtccggaagaacccgttcctgccctttcatctgaatcagcagcggctgacctgtacgtatcctgatctcctgcagttcctccggattactgacggattcttctacaagcttacggattttttctgccagcagattccagacctgcatcttcttgttctgtctttccatttccatcttgtccacctctccagttgttgtccgtacccctcctctctacacaatatatggataagattcttaaagtattccttgcgcatacaagaaaagaggaacaaaacccagtttcctgaattctgttcctcttttcttattctttctgattcttattctgcaacatctttcatgctgaagctgaatcttcccatcttatctttaccaaggcatacaaccttcacaacatcaccgatgcttacaacgtcttctaccttgtcaactctctgcttagaaagcttggaaatgtgtaccattccctctttacccggtgcaaactcaacgaatgctccgaattctttgatgctgataacctttccttcaaaaagctgtcctgcttcgtaatctgtaacgattgtctggatgtacttcgcagctttctccatgttctctttctctgtaccgcagatagatacatttccttcatcatcgatgtcgatcttaacaccagtctcgtcgatgattgcattgattgtcttaccacgctgtccgacaacatcaccgatcttctgtggatcgatctgcatctgaataatcttcggtgcaaactctccaacttcttttctaggctcagcgattgctttactcataacttcatccatgatgtaagttcttgctttctttgtagcagcgattgcttcttcgatgatcggtcttgtcaatccgtggatcttgatatccatctggattgctgtgataccttcgtgagtacctgctaccttgaagtccatgtctccgaagaagtcctcgagtccctggatatctgtcaatacaaggtaatcatcatctgtctcacctgttacaagtcctgcagagatacctgctacagcagacttgatcggcacacctgctgccatcagtgacatactggatgcgcagacacttgcctgtgatgtagatccattagactcaaatgtctcagatactgtacggatcgcatatgggaactcagactcgcttggaagtaccggaagaagtgctctctcagccagtgctccatgtccgatctcacgacgtcccggtcctctggaaggtcttgtctctcctacagagtaggacgggaagttgtagtgatgcatatatctctttgtcttctctgcttcatcaagaccgtcgagcttctgtgcttcagaaagtggagcaagtgttgtcattgtgcagatctgtgtctgtcctcttgtgaacatagcagaaccatgaactctcgggatcaggtctacttctgctgcaagcggtctgatctgatcgatcgcacgaccatccggacgcttatgatctttgaggatcatctttcttactgtcttcttctgatactggtaaacagcctcaccaagcttcgcaagatactcttcgttgtctgcaaatgcttcctcgagtctctctgtgatcacacggatattctcttctcttgtctgtttgtcatctgtaaatacagcctcttccatctcagcagccggaacgatctcctggatcgcatcaaagagttcctgcggaacagcaaagctctgatactcatgtttcggctttccacactctgcaacgatcgtgtcaaagaaagcgatcactttctggttcagatcatgtgccgcaaagattgcttcaatcatcttcgcttccggaacttccttcgcaccggcctcgatcatgataaccttttcctttgtagaagcaactgtcaatgcaagatcagatacttccttctgtgctgctgtcgggttgaatacgaactctccgtcaacgagtccaacctgtgttgtagagattggtccgtcaaacggaatatcagaaatacttgttgcaagtgcagcaccaagcatagctgtaagttccgggctgcagtcctgatctacagaaagaacaaggttctcaagtgttacgtcatttctataatctttcgggaaaagaggacgcatcggacgatcgatgacacggtctgtcaggatcgcattctcagatgctttaccctctctcttattaaatcctcccgggatctttcctacagcgtacattctctcattatactctacgctgagtgggaagaaatcaattccttctctcggcttgtcagatgctgttgctgtacacagtacagttgtgtcaccataatgcatcagcactgcaccattcgcctgttttgccacacggtcaacatccacgcgcagtgttctgccggccagttccatttcaaactttttatacatggttttctcctttttatcttatcttcgttttatatgagcagaacaattcgctccgaaactactgaaaaatgtactattccatagcaattgaagcccactgtaatcgattgataatacacttttcagtggtctcggttcttctctgcccacaagcttttaaattatatcatattccataataagaagtaaatagttttccaaaaaaagaacaaaaagtaccaaaaattcagacaaaaagaaacagaccagaaaccacatcatcagatgcagcttctgatctgtcaattgatcttcttttttggaaaatcttattattttctcagaccaagtttctcgatcagagcacggtatctctcgatatctactttcttgaggtatgcaagaagtcctcttctctgtccaaccatcttaagaagtcctcttcttgagtggtgatccttcgggttagctttgaagtgatctgtcagctcgttgattcttgctgtaaggatagcaacctgtacttccggtgatcctgtatctccctctgttcttccaaattctttgatgatagcctgtttcttctcttttgcgatcattgtaatatcctccttaaaattcttagttaaaccgcctggcattaagcaatggtcggagtgatccgattaccgaacaccggctgatttgatacctcggatagtatagcacagagatatctgcttgtaaagcacaaatttaaaatcttttatctttcatcgaatggatgatttttcagatattcctctccgtaccgcatatctttcatcacgcggtctttgagttcttcaaccgaatgaaatttcgtttccggacgttcgaactccaggatctgcactgtggcagtcttcccgtaagcatcgccttcatatccgtaaacataaacttcgaacaaccgtcttttctcttgcgcaacggtcggtttcaccccggcatttcccacaccgccataccatacaccatccacaaggacgcgacaggcatagacaccgtactttggcaggattttcttttcctgcggtgcaagattcattgtcggaaatccaagtgttcttccaagctgctgtccatgttccacaacactggtgatctcatacggataccccagaagcttatttgcaagaggaacatttccatcgaggagaagttccctgatataagtgctgctgatctcccggtctttgtaatatgctttctcgaccacatcaactgtatagccatatttcgctgcatatttctccagcatctggtgatttcctcttttttcatgaccaaagttaaagtccgttccgacaacaatgtgtgatgcgtgcagcttcttatgcaggatttcatcgataaatttctctgcttccatctccatcatttctctcgtaaatggaatctcgatcagataatctaccttgtcctcaagaaatgctcttcgctcttcatttgtcatcagacagtctctgtccatgtcaaaggcacaaacgacactgtcgcaatcttccttctgcgcatatttcattattctgttgagcagcttctgatgtcctctgtgcaatccatcaaactttccaagcgttaccgctgtgtgatttcttccgtcaaaggcatctaatccttttatatattgcatgtctgtcttattcgtcctttatttctcaattttctctgcttcaggatccagaaacattttcttaatatggaacagcttcttcggtgcacgatactgataaagaccgataaaattctttctggaatcatatactctgacttcctgtccatctgtccacgcttctttttctaacagaaaacgctccggaagatcatttccgttataagacatccatgccttcgcatccgtcacagtaacggccggcagttccgcgaagatctgatccagcggagtgaaaagttctgcaccttctccctgttccatcttctgtcgcacttcatccagtgttaccgcatcttctttcaggaaatggccgactttcgtacgctcaagttcttccatacagccgcccacctgaagcttctctccaatgtcatggcacaaagtacggatatatgttcctttagaacagtccacctccatacgcacatgcggaagattcatctccagaatgcgaattccatggatctggacttttctgctcttacgctccacggtctttccttcacgggcaagctcataaagcttcttcccattcactttcaacgcagagtacatcggcggaatctgatcatattctccgataaatgattcgatacaggaacgtacttcctcttccgtcagattgcccggattcctctcctccagaacctctccggaaatgtcctgcgtatctgtcgtctttcctaaaagcagcagagcctcatatgtcttatcatgatctgtcagaagctcacaaacctttgttgctcttccaagacacaccggaaggactcccgttgcatccggatcaagcgtacctgtatggccgatcttcttctgtccgacaacttttcgaagaaccgcaaccacatcatgggaagtgtatcctttttctttgtaaatattaactattccgtttatcatttttcctcgtttttctcttctgccgctctaagctgtctttcaattaaaagtgtcagattgttgatcacatcatacggggaacctttcattgtaacaccggctgctctcacatgaccgccaccaccataatatttcgcaactgcacttacatcaacgatttcttttgatctaagacttactttaaatgtctgcggttcgagctcataaagaaggattgcaacctccacacctcttgtctgacgcaatacgctgacaattccatccagatcagacggttttgcctggaagaactccatttctttcaaacgtatcactgagacaaccgctttcttattcaggatcatcatactctcaagaagtgccttcccaagcatctgattctgaacataggatttttcaaaatatgttccgtcaatgatcgcgcttccattgatcccttttcttaaaagtgcagcaccgacttccattgtctccggtgaagtacaggaatactggaacactccggtatcatgcacaatccccatataaaggaaagatgcgatttcttccgtaatcttctcctcatccagcagacggaaaacgagttcagaagtagaacttgcatccggcacgatataattcgtgtctgcaaaagactcgttactgacgtggtgatccacacataaagtttcctttgcattttggaacattggctcggaaaaaccaagacgtctttcgtccccgcaatccagactgatgaaaaggtcataaactttgccttctacaatctcatgcttcggcacatctctgtgtcccatcatctgaaatgcttctggaatctcctccagatacagatctgtctcaatctccggataataagtggtcagataaagatataatccaattgtagaaccaacgcagtccccatccggacgaatgtgtccgccaatggctacactgtgtttcccttttaatacatcgtttaatacgatcatctattcctcagctccatccttcaaatctcttgtcacttcgtcaattttcttgctgatatttactccatattcaatggactggtctacgataaatgtaatctgtggtgtgttgcgcatattcactgtacgtgcaagttctctgcggatatatccctctgcactctgaagacctttgatcgtatcttcctgtgctttcttgtctccgagaacactgatatatgccttgcatgtcttaagatccggtgctacttcaacagcaacaacagatgtcagcggtgcaacacgtggatctttgatcccgccacgcaggatattactcaactcacgctgtacttctgcattgactcttgtattcttaatactgttctttctcatgttataactccttttttatacagaaaagttactcctgcaatgtatgacccctgcacgagtaacaattctgtcacctgctgacaattacaacactctgcaaatgtcggcatcttttattcttacttgcgttctgtctctaccatcttgtaggcttcaacctgatcgccttctttaatgtcattgtagttctcgaatacgagaccacactcatatcctgttctgacttccttcacgtcatctttgaaacgcttcagagatgccagcggtccgtcgaatacaacgattccgtcacggatcagacgaacagaacagtttctctcgaagataccgtcaagcacatatgcaccggcaattgttccaactcctgatgccttgaatgtctgacgtacttccgcatgaccgagaaccttctcctcaaagacaggatcaagcatacccttcatggctgcctctacatcttcgatggcattgtagataactctgtaaagtcttaagtcaacaccctcacgctcagcgatatctttcgctgttgcatccggacgaacgttaaatccaatgatgatcgcatttgatgcagatgcaaggataacgtcagattcattgatcgcaccaacaccgccatggatgatcttaacaacaacttcatcgttactcagcttcagaagactctgcttgattgcctctacagatccctgaacatcagccttaacaacaatgtcaagttctttcaggttaccttcctggatctggttgaacagatcatccagagacatcttggacttcgtctcttccagaagttttaccttgttctgggaaataaatgtctctgcaaacgctcttgcttctttatcagactcacatcctacgaatacttctcccgcattcggaacatcattcagaccaaggatctcaaccggctgggacggacctgcttctttcacacgtcttcccttgtcatccatcatcgctcttacacgaccatgagcgcttcctgctgcgatcgcatctcctacgtggagtgtacctttctgtacaagaacagttgcaacagatcccttacctttatcaagctcagcctcgatcacaagaccacgtgcggcacggttcgggttcgctttcagttccataacctctgctgtcagaaggatcatctcaagaagatcctggattccttcatgtgtatgcgctgataccggaacaaagattgtgcttccgccccagtcttccggaatcagttcgtattctgtcagttcctgttttacacgttcaacattcgcacttggcttatcgatcttgttgatcgcaacaataatctcaattcctgctgctttcgcatggttgattgcctcaattgtctgtggcataacaccgtcatccgcagcaactacaaggattgcgatatctgtagagtttgctccacgcatacgcattgcagtaaatgcctcatgtcccggtgtgtcgaggaatgtgatcttttctccgttaatctcaacaacagatgcaccgatgtgctgtgtgataccaccggcctcacgacctgttacattactgttacggattgcatccagaagagatgtcttaccatggtcaacatgacccataacacatacaaccggtgggcgttttaccataaggctttcgtcttcttcatcctctttcagaagttcttcgatcacatctacaacttcttctttctcacagagaacatcgaattccatcgcgatctcttctgctgtctcataatcaacttcctgatttacagttacgatcttgccctgcatgaaaagcttcttaacaataacagaaggaacgatcttcatcttatcagcaagctctttaattgtaagaacttctggaatcacgatctgtttgatctgctcttcctgcttctcttccttcacctgtggcttcttcacttccactgccggtttctgcttcttgccttttcttccttttccttcgaaagcttcatctctgtattctttcttcttattatctctttctttgtctttcgctttgtttctctgtgtcttctgctgttctacgatcggtgtagcgtcacttctgtcgtttctgcgattgtcatttcttctgtcagagcgctgtccctgtccgcgtccatctcttccgtcacggttctctcttccatcacggttgtcgcgtccctggaatccgtcacgtcctcctctgtcagaacgctgtccgcgtccgtctctgtcctgacgtggtcctctgttttcgcctctgttctcgccattagaacgtctgtctccaaatggtttctgtcccggtctgtcagagcgtacctgtcttccctcaccactcggacgtcctgttcttgatccctgcggtctctcagaacgtgctccgttctgtgccggacgtgccggtctgtcctctgctgcacgaaccggtctttcgctttttgctgccggtttctctgtacgagccggttttccttcaccattcgaacggctctgtcctgctgccgggcgttttccatcaccgtttggacgaccctggttctgtccctgacgtccctgtcccggacgttttccctgcagtctgctgctgttctttgaattctgcgggcgaactacaaatgcaagatttttcttctttggagcaccctctttttctgttgttttatctgcagccatctcagcatctttgccagctgcttctcttctaatatcttctgccacgttatcctccctggtgtttaaactctttttattttcattctgcatcttctcatctgccatataaatctacctccttcaagcaatcaacggggaacctttgtcttctactcccattcatcaggtacgggatttcagttcttttaatattccttttgcaaatccttcgtctaatatcgccagagatgcacggaattgttttcccatcgcatgccccaaggtatctttatctccgtaaactatcattggaactttataaaatttacacatatcacggaattttttctttgtattatctgaagcgtcttctgcaacaactacaaggcttgctcttccggacttcgtctgtccttctgtcataaattcaccgcttgcgcagcgccccgctttcgttgccagactgatcagagacagtactttatctctagccaatctcatccatctccttttccagccgttcatatacttcctgcggtattgcctgcttaaaggaacgctccagtcctctgttcttcacagcctgctcaaaacatgccttctgcggacagagatacgctccacgtccgtttttctttccggttgtgtcaatgacaaattcttcttcctctgttctgaggatccgaatcagttccttctttggtttcatctcgccgcagcctacacatttacgcataggtactttcttctttactgccaaacaattcactccctcagatcttactcttcgtctgtctcaacgaattcaatctcatctgctccgtcttcatcagctgcatctgccggaacatcatcgtactcttcttcctcttctccgactgtatagccttcttctccgaccatacccatctgctccatgtagttctccggaagatctccacactcaattgcctgtgtctcactcttgatatcgatcttgtatcctgtcagacgggctgcaagtcttgcattctggccttctttaccgattgcaagtgaaagctgataatcaggaacaataactcctgcaatcttctcatccggatcagccataacagaaataaccttcgccgggctgagtgcattctcaatcagaagtgccgggttctcatcccaattaatgatatcaatcttctcaccacgaagctcttttacgactgcatttactcttgcaccgttcataccaacacaagctccgaccggatcaacattcggatcgttagaccatacagccatctttgtacgagaaccagcctcacgggcaatgctcttgatctcaactgttccgtcctttacctctgcaacctctgattcaaacagacgttttacaagttccggatgtgtacgggatacaaggatctttggtccctttggtgtgttcttaacttctacgatataaagcttaatacgctctgttggctcgaaatgctctcctttcacctgttcgttctctgtaaggattgcatctgcttttccaagattcacactgatattcttgccaatataacgctgtacgatacctgttacgatatccttctctttctcgaaatactgatcaaatactgccttgcgctcttcttctctgatcttctgaagaatcaggttctttgcattctgtgttgcaatacgtccgaattccttggaatgaagctcaacctgtgcgatatctccgatatgaagtgccggattgatcttctctgcatcctcaagactgatctcgattgcaggatcaaatacttcttcaacaacttctctctctgcgtatacagagtagtcacatgtgttgcggtccataacgatcttaatattatcggatgttccgaaatggttcttacatgcacttaaaagtgaattctcaatggcctccaacatgacatccttgctgatgtttttctctttttcaagaatatccaatgcttcgagtaattctgtgttcatttttctttcctcctaaattaaaaatccaaagcctgacggatcaaagcgatttcttttctgtcaaatgtctgctctgtctcatcttcgtatgtgatggtcactgtattctcatcataactctttaaaattccgacgaactctttctgtcggtcgattgcacggtatgtgcggatctctacttcttctccaagatttctcttaaaatccttctctttcttaagtggtcttccaagtcccggagaacttacttcaaagatataggagtcttcaatataatccttctcatcaaggatatcggagaatctcctgctgactgcctcacagtcatccacggcaattccgcctggtttgtcaatatacgcgcgaaggtaccaggtacctccttctttcacatattctacatctaccagctcaaacccgagttcctctacgataggctcgagaagtgcttctgtctgctgttcataatcttctcttctggacacgctgcgtcaaactccttttcttctataatatagtttgtgatctgattcataaagaattctccatatcaccaaagaagagtgaactttcgtccactcttctgccaattccttatgtaactatatttactctagcacttttctttgaggaaatcaagggtttttgcacattttcttacaataccttagaaatccccttaactttctctttcttcaccgtctccgcttcctgcaagacttctagcggcttttggttcctgttccatcccgtttcgccagtttcaggcggttcaatgaaactgtcttttctccataagtaatcttcgtctctgttccttcttcaaaaagataaacttcttctaattcatccttcttctgaagcttaattcctctgacaccgacagctgcttttttcttctccggaacatccacagataaaaatctcaggaaatatccgttcttcgtctgaaggacaacattctgatactccgtcacaaccttcactgcgacaagcctgtcttcttcctgcagctttgttgccgcgatcgtgcgcttggatacctggaactcacttccatccacacgcttgatcattccctgtgctgttgcaaacaataattttgaataacgcatctgctcttcttcacagatcataacaatctgttcttcactgcttgaataattacttacattatcaatcggaatccctttgtctctgaactttccatgtggaagatcaagcaccttcacctgatgcatcttgccttcatctgtaaacagacagagttttccaatgttcatacaatgcacaatgtatttattctctttgtctgcagcttctttattcctctcatagactccggtatccactgtcttcgcgtaaccaaagcgatccatcagaaagacgacctgctgctcttcaatcttcttctcttcaaaaacagcttcttctgcattctccacaacggtacgacgctttcttccgaattcttttttataactgtcaagctcttccatgatcacgcctgccatggaatcatagttatttaaaatatcttcataacgggcaatattttctaatgtcttctcatgctctttctgaagtgcttcaatctccagaccgatcagacgataaagacgcatctccagaattgccgttgcctgacgttctgtaaaacggagcattgccgccatctttttggaaatcgcagacttgaacttaatgttttccgtctcaccgtttaccagacaggcacgcgcatcttttacagatttacttcctcgtaaaatctcaatgatcaggtcgatcacatcacatgctttgatcagaccttcctgaacttcactcttctcccgctctttgccaagcaaagttgtatatttcctcgttgcaagctcaaactggaaatctacatgatgttctatgatctgtttcagacttaaagtctccggtctgccattcgcaaccgccagcatatttacgccaaatgtatcttccagacgtgtcttcttataaagcatgttcttcaggttctcaacatccgcaccacgcttcaattcgatcacgatacggattccttcttttgaagactggtttgaaatatcaacgatatctgtcgtcttcttggattccacaagattgcagacatcgtttaagaactttccgattccggctccgatcatcgtgtatgggatctctgtgatcacaagctgcttcttgccgccttttaattcttccacttccacttttccacgcagcttgatcttcccctgtccgctctcatagattgccggaagatcatccttattgaccacaattcctccggtcgggaaatccggtcctttgatatatttcatcagctgctttgtagtgatcttgtcattcttcatatatgccttgaccgcatcgaccacttcgcagagattatgtgtcgggatacttgtcgccataccgactgcaattccttccgcaccattgatcagaaggttcggtacacgcatcggaagcacaagcggttccttctccgtctcatcaaagttcggaccaaaatcaataacattcttatccagatcggccagacatacttcctgcgtgaacttcgtaaggcgcgcctctgtataacgcatcgcagcagctccgtctccctcaatggatccaaagttaccgtgcccgtcaacaagaacctgtcccttcttgaagtcctgcgccattactacaagagaatcgtaaatggaactgtctccatgcggatgatatttacccatcgtatctccgacgatacgtgcactcttacgataaggcttatcataacggataccaagctcgtacatatcataaagtgtacgacgctgaaccggcttgagaccatcacggacatccggaagtgctctggcgataataacactcatcgcataatcaatataagattttttcataagatcagaatattctgtccttatgatctgtgattcattactcattcttcttctccttagatatccagttctgcctctgtcgcattttcatagataaaattacgacgcggcggtacttcagttcccatcagcatctccgttacactcgaagccattcgggcatcctcaatctctactcgtttcaacatacgtctctccggatccagtgtcgtctcccagagctgctccgcatccatctctccaagacctttgtaacgctgaagtgtgaacggacctgtatgtgtctttctataacgttccagtgccttatcatcatacagatactcttcttctccactctttggcattgccttataaagtggcggcattgcaatatatacatgtccttcaaaaataagctctggcataaaacgatagaataaggtgagcaataaggtagaaatatgtgcaccatcgacatcggcatcggccatgatgatgatcttatcatatctcaactttgtaatatcaaagtcatttccgtatccttcagaaaatccgcagccaaatgcattgatcatcgtcttgatctctgcattggcaagcaccttatcaatacttgctttctcaacatttaagatcttaccacggatcggaaggattgcctgataatttctgtttctcgctgtcttcgcagaaccgccggcggaatctccctcgacgataaagatctcacacttcttcggatctctgctctcacagtttgccagctttccgttactgtcaaaagaatacttctgctttgtcaggagattggtctttgccttctcttctgtcttgcggatcttcgcagctttctccgcgctggaaagaactgtcttaagtgtatccagatttcgatcgaagaaacgaacaatctcttctcctgtcaccttgctgactgctttcgccgcatccgggttatccaactttgtcttcgtctgcccctcaaatctcggatccgggtgcttaatggatacaattgctgtcattccgttacggatatctgcaccggtaaaattcgcatccttttctttcaggattcctatctccctcgcatactggttcatgacagttgtaaaggttgtcttaaatcctgtcagatgtgttccgccctctgcattataaatattattacaaaatccaagtacattctcatgaaactcattcacatactgcagtgttacctctacttcaatcccgtctgcttcccctttaaaataaaccgggtcatgaagtacttctttcttacggttcagatcctggataaatccaatgattccttccggttcatgataaacgatgtgctcaatgcttccatctctcttatcatcaaacacgatcgtcagattcggattcagatacgcagtctcatgcagacggctcttaacctcttccgctttgaacttcgtcttctcaaagatcgtatcatccggcagaaaatttaccgttgttcccgtctttctcgtctttccgatcttaggaagaagtccatcttccagttcgatcaccgggattcctctctcgtaccggtcatgatgaacaaatccatccctgctgatcttcacatccatataagtagaaagagcatttacaacagaggaacctactccgtgaagtccaccacttgtcttatatgcagaatcatcaaacttaccacctgcatggagtgtcgtataaaccagacgagccgcagatacacccttctgatgcatatcaaccggaactccacggccgttatctgaaacggttgcagatccgtctttttccaatgtcacctggatctcactgcagaatcctgccaggtgctcatctactgcattgtccacgatctcatagatcagatgattcagtccttttgtagaaacacttcctatgtacattcccgggcgtttccgtactgcctcaagaccttccaataccgcgatactccctgcatcgtatgtattatttcccgccattactctttctccttctttctcgaactcaaactgttctatacagtcaatcaacaaatatgatatcatttaaccatctgattttcaacttctttttcgctcatatgttctgtcaaccttcttctgacaagagaggactgtaactgtccgacaaccgtttattctgtaactacccgctttaatgtccgttccagtacctccattgcattcttcatctcttccaccgtatttgtctgcgcccctgcttcgatcaacagagactttggcagcagatgaagattataacggtaagctttcagataaatatgccttgcaaatcccgggtaatactgttccgatgcaatctgcatctgcaaggagaacgccagattatcctggatatatggattatacagataggcaatatcgccatttgtccgtgtcctgctcaatccattaaaatacataatcttcgcagtctgttttccattcacttccgttaccagatgtgtgtcctcatttacaccgtctctgtgaagatcgatcgcaacttcaatcgtcggattcgcttccagaaccggccgtactgcactttctgcattctcatatgccctgctgcggtcaagtttcccattaataatatcatacactccgctgtcatgaagtgtctcaatcccatccgcatttaataactgcgtcagatattccccaatcccaacgatgcttgtagatggatcacccggtatggagtcggcaaattcttcctgtgaatgcgtatgaaagatcaaaattttcggacctcctgtactttgatctatcttcatactccggtttaaaagatcatccacattaagctgctccggtccgatcattgtagaactgtctattgtataaagattgcttgtcagatattcaaaatcatgcagccgctcaatagaaagatccattccaggaaccggctgttctacagcactttcctgagttgccggctctgctccgaccagtttcccctcttcatctaccgcatgttcatcatttgcctgacactgaagaatccatgcgatcgtttcctcatcttccaatacttccgtctgttcttcctttccccttttttctgtctgatcttccagatatcctgccaacggcatccacacatgaagtggaagcctgaagatctcttccctttctgattcctgttctttctgataagaaaaaagcggaaggtacaatttctgcgcataaatctgactttcttctaataaaaatattctcccctcttccaatgaccggcccataccaattcctaacggaatacctgacagaaccagaatcaccccataccatttcatacgtcggattgtttttttcttatacacacgcattgcagagtccttccgctcatttctatcattctattcgctttctcctgcatttatatcagaaaaaagaagattcaaggacgctgctatcgtatgactgatctgatggaccatttcatccacatcctttggtgtcacaaacattccatttaaatgtggggagatcaattcttttacaaactcatatttttccgccgcactataagagcgcaaaatctctcctgtactccttaatgcctgcgactgctccagtgcagtgatgaaattttccatcgtatcattgacgatcgttgccgcatcaacaaccgtaggcactccgattccaatcacaggaacccccagagattcttccgtcattgcattcctgtaatttccaacaccggaacccggatgaattcctgtatcggcaatctgaatcgtccggttcaatcgtctgctgtttcgcgcagcaagtgcatccactgcaaggatcagatccggcttcgtctcatggacaattccacggacaatctccgccgtttccatccccgtttgtcccatcacgccgggaacaattgcactaagaacaatcaattgctccgtacgcatcgcatatttcccgtattcttttactatatgccggtttacctccagatgatctgcaacataaggaccaagcgcatccggtgtcaccgctctgttaccgagcccgacaaaaagaatctttaattcttttctatcttcacaggaaattttatggaaaatcaattcccggatgcaatcacagatccgttcctgtaataccctgctattttcttccacctccaatgccagatccggagattccagtgtcagataaatgcctgtcggttttcccatgatcttcgctccattctccgtctcgatcaccacacgggtcagccggatctcattctcctcgtcatactcttcctccagaacaactccctgcacttctacattgtcagatgcaaaacgttccttctcctcaagtgcaagatccgtacgcacactgtaatttttcatcatagcctcccttttctccgtgtcaggttaaagattcttgtatactgtaaccacgattcgttttattacagcctatttttagcatttttttgtaaaatatgtattgacagaacacgtttgttggactagaataaatgagtatgtttcgatagaacgtccgtgtccgagtctattgaacacatgaatcacatttgaaaatcatatgatagaatattttggaggtgcacacattggctaatattaaatctgcaaagaaaagaattttagtaacagagacaaaagctgctagaaacaaagcaatcaaatctaaggttaaaacagctgtaaagaaagtagagacagctgtagctaagaagaatgtagaggctgctaaggctgctcttcacacagcaatcgttgagatttccaaagctggaagcaagggtgtttatcacaagaaaacagtttccagaaagatcgctcgtctttccaaagctgttgactctatcgcttaattataaatagagaatagaattttcaggcgcatctgctaccgtcatggcagatgcgccttttgttatacgttcagagccaggcagttctaaagatacagatacgagccatgctcgcatgagcgagattctgtattcttagaactatgtggcggatacgctacatctctaaaatgcgtagcattttagagatgcctggctgctgcacgacgcctcagtcaaaaagaccggtactctcaagccagcttaatgcctcgactcgaaaagtaccggtcttctattatcttattctataatctcagacaactgattagttgttgatcagtttgtcctcatcactccagctgtaaagctttctgatctcagctccaaccttctctgactggtgctcagcagcaagttttctcatagccttgaagtgaacctgtccacctgcatcagacatatcaagcaggaagtcttttgcaaatgtaccatcctggatatcagaaagaattttcttcatagctttctttgtctcagctgtaacgatcttaggtcctgtgatataatcaccgtactcagctgtgttagagatagaatatctcattccagcgaatcctgactggtaaatcaggtcaacgatcagcttcatctcatggatacactcaaagtatgcatttctcggatcatatccagcctcacaaagagtctcgaatccagcctgcataagtgcacatacaccaccacaaagtacagcctgctctccgaagaggtctgtctctgtctctgttctgaatgttgtctcaagaactccggctcttgctccaccgattccaagaccataagcaagtgctctgtcaagagcctttcctgtgtaatcctgctctacagctaccagacaaggtgttccttttccagcctgatactcgcttcttactgtatgtcctggtgccttaggtgcgatcattgtaacatcaacattcttcggcggtacgattgttccgaaatggatgttgaatccgtgagcgaacataagcatgttaccctcttcaaggtttggctcgatgtcttctttgtaaagtttagcctgtttctcatcgttgatcagaatcatgatgatgtcagcctgctttgcagcttcagctgctgtatatactttgaatccctgctcttctgctttcttccaggaacggcttccctcatacagaccgatgataacatcacatcctgactctcttaagttcagtgcatgtgcatgtccctggcttccgtatccaatgatagcgatcttctgtccttcgagaagagaaaggttacaatcttcctgataataaatttttgctgccattttgcattcctcctaaataaatttaaaatatagagtagaatgctcccgatctcttcgggggtatcctatatagtgaaaggtcttgccctttactagctttatctgttccacaagctctccctgcggttctccgatcctgaccggatcagaaaaatgcaacatccttgctgcctctggaaagtccggtaattccggttcttgccagttcgagtatctcataatcctttagaagattcaggaaagcttccagcttattctgtgtacctgtcaattcaatgatcagacaatcttcttccacatctacgatctttgctctgaaaatatctgcaactgagatgatctccccacgctgtgcggcattcgcacgaagcttcaccatgatcaactctctgcaaacggattcttctgctttcaacgccttgatatccacaacatcctccaacttacgaagttgcttctcaatctgtgataggatctgctcatcaccggatgaaacaattgtaatccttgtaaatctaggatctgctgtcatacctgccgtaatactgtcaatgctgtatccacgacggctgaagagtcctgaaattctgctcaaaacacctgaattgttatctacgagcagtgaaaatacctgacttctcatatgtatcctctctttctcacttcaggaagcgaaaatattatgactgactaagatgactggttcgctccttccatgatttgtataaaacagagtgcgttctgttttttacttacttaatattaacaactagaaccggctttgtcaaccctctttttgagatttttcatcacagaccaaattcctctgccagttcattcaaatacatccaacgctcttccttctcttcgagctgctctcttactttctcctgctcttccatcagctcacgcagtttcactgaattcgttgcatttgcggcaatctgacgatcaagagacgcaattttttcttccagctttgcaatctcctcatcaattgtctcatattcacgctgctccttgaaagaaaacttcaccttctggcgctgcccgtccttccagttctttcctttcttctgcgtctcttcttccgtggacttttctgccggcttaagttcagactttcctgtgatagctttgctttcctctccgaatctgcgtttcttcgcctctacataatccgtgtatcctccctcaaactgtcggataccgccgtttccatccagttcaaagatacggtcaactacattatcaaggaaatatctgtcatgcgatacggtgatcacaatacctgtaaatgaattcagatagtcctcaagaatcgtaagtgttgggatatccagattatttccggcctcgtcaaacaacagaacattcgcattctccgcaagaacaccaagaagataaagccttctcttctcccctccggaaagcttaccgattggtgcatactgcatatccggtgtaaataagaatctctccaacaattgactcgcactgatctgtccgtcctttgtcgtcacatactccgcaatatctttcacgtaatcgatcacacgctgggaatcatccatatgctgttcttcctgtgcaaaatatccgatcttgatcgtctcaccgatctcaatctctcctgcatccggcttgagtacacctgcgatcatcttaagaattgttgattttccacagccgttcggtccgataattccaagccgctgattgcgaagcacaatataactgaaatcatccagaatcttcttctccccaaaacgcttgctgacatgatgaagttcgatcgtcttcttgcccattcgcgtctctacagaatcaagctccaccgtctgatccgtcacaggtgcttttcctgctttcaacgcttccagacgttccagtcttgccttctgctttgtcgttctcgcacggcatccacgcttcgcccattccagttccatccgaagaatactctgacgctttctctgacttgcaagctccatctcttccctctgcgccttcaattcaagaaatccggaataatccgcatcatatccatacatctttccatggctcagctccaggatacggttcgtcacacgatcaaggaaatagcggtcatgtgttaccataagaacagttccacggtaagatctcagataatcttccagccaggaaatcatctcctgatccagatgattcgtcggctcgtccagaagaagtacatcaaagtctcctgcaagtatcttcgcaagaaccacacgtctcttctgtcccccggataaagtgtcgatcttctgatcccactgcgtgatcccaagttccgtcagattactttccacctgccagctctccgcatctgcatcctgaagtgcataggaacggatatccatcccctccggaaatgtcggattctgcggaacaaaagcaatcttcagaccattctgacgaacaacctgcccctcatccggcacttcctctcccgcaaccaccttcaaaagagttgactttccggttccgttaatcccaacaatcccgatcttatccccctgctgaacaccaaacgatgcatcatcaaaaatcactttctccccatatattttagaaatatgttctatattaattaaattcattcttttccctgctttctgtttttctgcatttttatcaatcacatcgccattccagtataacagatatttcagacactgaaaatcttaaaaatttttaaattcatatttgaaagggttgagaaaacacggaaaacgttataacatagtgagatacatgcaatgacatggtttcaaatggaaagtgaggtaaatgatatgagcccgaagaatgatttctcagacattttcgatgatgattttgaagttacatatgaagaagatccggaaatcaattttcatacttctgaagatacagaacaaataaacagacctgattctaacacagagacaatcgttatgaacgcagacgattaccgagataactttaacgattccgatgacagccagttcgaagaagtacttcctgaatatgacgatgattatgaagatgatgatgcagattacgaggatgattattatgaggatgattataacactcctaacaaacgatcaaatcgcaacaatccttataatgattcatataatgatcgcgactacgacagacgctcctccggcaggaaacgttccggtggcggagtaaaacttgccgcaccgatcaaaaaaggcggaaaggcattatcaaggctcacaagcacattgcttcagcagctttctattgtgttaattctggccacaacagcatttgtactctacaacttttaccgtgcaagcacaccgtacggagatatccaggaggcaatccagacacagaagatttcccagactctggccgcttacttatgtgtagctgccctcttcctgttcttcgaattcatctcccttctctggtcaatgacacgcgtccgcgtacgtgacggagtctccagctggagagaagataccggaagaggcctgtggtcttttatccttgtattcgcgatttcctatgctgcgttcctcttcagtccgttactccctgattcaccggaagtgatctacggagtgaaaggagctcttgatgtatacggttccctccacaatgtattgtttggactgtgtgcagccggagtcatctcctgcctgatcagaaaatacaaaagttccaattagaatacaatattccctttacaaaaagtgcacccggcaatgaaatcaattacgaaatcattgccggatgcacttttaaaatttatgggccagtctcaaaaaatacgatgcattaatccaaaatgatcagtgccataaatacaagatctgtatcccctgtattcgtcagtccgtgtcccattccatccggtgtaaatgtcacatctcctgctttcaccgggcggatacgtccattgtcatcataatttccttccccacgaagaatataatatgtctcactctcgttgtgatgctcatgatatccaagagaacatcccggctccagtgtgacttctgcatacatcttgcactttccgttcagttccttatcttccagaatgtgcttgatgataacgtgtccctttccaccagccatgttttcttttctctcaactcttaattcactcatcttcaattcctcctaaaacatttttattgtaaagcttatttgctacaatacgtcttttatctgacatttatttcatatagatcaattcatactctcttgttccaagaccgatcttctctgcatgtgccagacaagtcttgtactctgaattcggtgttgtattctcaaaatgatcatgatgatcgcagaaattctcttcttccatacgatctgcaagctggctgtgcggcaacggtgtcgcgctaagacagacatctgcacacgcctgatccagcgccagcggatcaaaagaggcaaacataccgatattcggcaggatcggtgcatcattctccggatgacagtcacagttcggtgatacgtcaacgatcagtgaaatatggaagttcggtcttccatccacaaccgcctttgtatactctgccatcttgcagttcaataccttggttgccgcactgtccataaatgaaattgcatcaaagttacatgccccgatacatcttccacatccaacacaatgttcaagatcaatcgacatctttcttgcatcagcatcataaatcaggccgtcattcgcacactctctcagacagctcttacatcctctacaggcttcctgatcgatcgtcggtttaccaacagaatgctgatccttcttaccggctctggaaccacatcccattccgatattcttgatcgtaccaccgaaacctgtcgtctcatgccctttaaaatgcgtcagactgataaatacatccgcatccatcacggcacgtccgatcttcgctttctctatgtactctcctccctgtaccggaacttcaatatcatccgttcccttcaggccgtctccgataatcaccggacatccgacactcaacggtgtaaatccattctcccatgcacagtaaagatgctccagtgcgttctttctactgcccggatatagtgtattacaatctgtaaggaatggctttcctccaagctccttcacgacatcaacaaccgccttagcataattcggacggagataactgatattccccatctctccaaaatgcatcttaatcgccacaaatttattctccatgtcaatctcactgattcctgctttcttcatcagacgtttcagcttcgttggaagaccttcgccaagcttcgcccggaaatcagtataatacacccttgctttttccatgatgtaaacctcctgttgtaaattctgacagtttaaccctgcattcttatcatacactataaatctgactcttccaatcatttttagaaaaataataaagtggacatccccttgacgatacggtatactcaaattatcaattccgaacccaataaatgcagtaccattcaccagaaggacgaaaagaacctggcgagacctatccggatgaagttcatttcttcgatcaggatatgaaggaaatggatgaaaggaaacaggagtcggtttgcgttacccgtgttgtacgcagcgactcctgttttttatttatcttattattttttctttaccaggcaacgctttttatagaatgcaatgccatagcaatgaatatgatcactgtcatactcgtcctcaaaatcccttgcatacattctttcatcaatttgccgcaatgctttctcacactcggattccagttcatctaccgaccttgcacgtttagcctcgaaaatttgcttgatttccaaattcggaattttcaatgccaccatgttgtcttgccagccatcatcaatcttataatctctaacctgcgttaaatatcccgtcaaatacattaagctccacagattttcctcagaagaatgtaaatagtcgtaagttatcttgtcaaaaaatttcacgcgctccaatgtattttgatactaccgtcttactggataaatgacaagttgggtaaggtaaatagtaggattgtttaatgtaaaccaaactctttcaatagttttctctgatattctttgtcagccgccgcttttgtaatgtcttctgtacgtccaagttttgacagttctagaattaattgattgatttctgctcttccttcttctatcccaatcttacgtccattctcaattcctcgtctttctgcggttaacattcctatattgtaatctctaatcgctctttgtcttgtctcgtattctaacctcttcttttcatctgcgcttaatttacggaatatcattttgcccacctctttactcatgcagttccaacggcagtccgtccgggtcatggaagaaagtcatcttctttcctgtataatcgtcaacccgaatcagctcacattcaataccgacttccgccaactcattcaccgtctgctccacgctatcaacgcagaacgcaagatgacgcagaccacaggcctccggccggtttacacgcttcggaggatttgcctcggagaaaatctccagctctgtttgctcattgacacgcagatccagcttccagtccttgcgctccgggcgatagttttctctaatgacagagaaacccagcttgtttacatagaaatccttagcggcttcgtagtcagatacaatgattgcaacatgatgtatttttgataaattcatttttctcacgctccttgtcacatgccgttcatccgcatcttctctcaatgccaatgccagcaaaagttcgtccacaatatttcgtaataatttaagtgcctgacaccaatgttatgtattcctgtcttcgtatcatggaatgcaatgtaagtaggtaatcaatctgttcaaatttctttctaagatcatatctaattttcactcatcccgcagcaatatgcattcacttttacttcgtactcttttgttacttattttcttcgtttatacggatatctagggatgaaaatataatgaggtcagaccacaatgtggtcagccttggagtcatgtttcttaataaatagtaactattaaacgacctcatcttctagcatttcttttaatccttccaataaacgttgtgctgtcacctttcccataacaattgttgccacttcatccattattacaccatcattatcatccgtaaaatcaggactacgttgtaacaatttaattatcaactcatctttttcagaatccatagcacatgaaaatccgtttacatattgtaacatcttatttacctctctttacatttcttgcaactcaaaattatttattatctttattgtattattatctagatgatttcttttagaattaaattgaagaatattacttttactaaattttttatcatcatccctagcaaatatatattccttcttctgctctatatagcattcctttgatttcttaactggaggtttcaaattaatacataattctaactctaatttctctgcaatttctgaaagtgccttaattgagaaattataatctccaccttcccatcttgataccattccctgactaactccaagatatcctgcaaattctttctgcgacattttcaattccattctacgcttaacaatagatgctgaaatcttacccaaatatctcgatgcattaatatcagcaattgaaatattatcctcaaacatagctaataaatcctctaatgaagtgctattttccttattttttttctccatactataaattctcccttttctagacttcctcaaatctactgtccaaaaccttcttatattgagtataatctgtttttttctttcctgcacgctcatagaatgctactaaaaatttaggtgtatctttttcgtcaaatgccatcaataatctaaagttaaaattttttcccgataaatgcaatgaataataatctctatcttgattctttattatttcattactatctgctttacatacatttgttcccagttcctttaaaaaatttaattgttttactaataatgtgaaaatttctttttcattacccgtagcatttttaagcagtacttgaaactcatacataaacttaggatgaaaaacatatcccctttccgaacattcttccaaatttttaaccagttccgctaatacctgtttcttattcatataaatattctgatttgttaattatattacttatatgtaatataatcaagccatttccttcctaattattatctagatttttatgtgaatctcacacgactaaaatcttacacttcccatccactttaaacaataagactaactatcaattgttacctggtttccagatataggtagtcctccgtttttacatcttatttcactatttattcgtttatacggatttaattggtaaatttttatgaaagctcttttagcgcttccaaatatccgatcaaccttttctgtgcatttgtatctaatttttgatatgtttctaccagcattccaatttctgtctctttactaatcacataagtattattatccctgcttctgtttcctgtatgctctgctcctgataacagctcatatggtgtcacatccaacacttcgcaaatgatcaaaatcttatcacttaccggatttgttctttttttcttccagtcacttattgaactctctgcaattcctgttctctgggcaaattctttctggctcattcccttttcttttaataattcaaaaatcttatcactgattgttttcattccttcttttccgcctcttttttcttaccagtacctacatatatagcaggtactggacagttaattgcttttcttattttcataagtctatcactttatatatgatttgtaaatacgaatttatttgtttatgataatttaatagggtcagaccacaatgtggtctacgacgaaaaaaacaaagcaataggcagaacacattttaacaacaaaaaagtcgcattctaataatcaatagtttttaacatggcttttccgtgaagctctattaaagtgcgtctttttttctaatctactttcctcttttcccgatttcacaccattggcccttgctctggccaagcacttgtcttaagttgacactgggttgaccacattagtgcctgacaccttttatttaacacagatttgatgaagcattaaaggttattccaaaagttcatcaaaaagagtctgtgttgtacctgctcacattattattcgtctttatttatatttccataatccaattacaaatttttaataaatcttcttgtataaatatttcctttgtaagctctcttccctgccacattatatcatgatctttcgccgtatcaaaaataagccataacaactctcttatactcatatggcttatatttttaaattccttttctctatataattcttctactattatatggacaaaatgatctacccatcgaagttttcctagtgcctcaacaattttctgatcagatttcacaaaatacaattcattaaaattattcaaatttaattctcttagcacagtacattgtttatcaaaaaaagaaagaaccatttcctcttgaagattatcttcttcccataactcaaaataatgacatctttcatcatacaacttacataaaaaatcttttttcgacttctcttgaataaattcttcgactttctttttaaattcaatacgaaaccaaaatatattctcttgcctataaaataattttagcatatcatctcctaaaaaagagagttgttcaataattatgctatcatcgggaaatgggaatgctgtagatacaagttttgcaacatttccatcaaatatactttcattaagatttatgtgtatcatagcctgccctttatgaggcatatccactctcaaaatatatttatcttgattatgaagagaaaaaatcatctcaaccctcgttgtatgatcattactattacgttttgatgcttcattttttagatttcctatctgaaaatatattttttcaattttcccaaaatataataattgtctatatattttgagcattgcttttgcaaatttcttttcttgtactgttgctttttcatctaaaaacaccaaaaatgttgatattgtaacaccaagaacatctatctgtttcctaatgtctattgcatcaaaaatcagagccataacatctgatggataatcatcatctgacaattcatcccatgggaacatttcatctatcatatcatctctatcttgaactccctgaattaaataaagtagttcaatgtcattttctatagcctcaattattcttggctcaatagttacatgtgaaaacaaagcttctttttcagcagtacatgcttgatcaatacacgttaaaatacttaatatgcttatttccatctctctaagacaattactagcttctacaaaactctttatttcaagaaattgtatatatgcttcccagttatttcccaaagatgcaaatttcttttttatatcaatcagcaccttctctcatctcccttttatcacttatataagcttcatctattattaatattaccgcatcaattaaccaaaaaagtgtcaataacgtatagtatttatagtttctcaccactttcaaaccttcgaatgcaactttcacgtctatcatatatcagtattctaaaaatcttttcaataacttttctctctgactattattgaataataaatcaacaactgactgcatgtcttcatgataaagaaaaacaataatgtctccatatctaaccgcaagatagtgttctaataacatgtgatcactcctcttcagatttactttgcaaatattgcatgatctctctggctcgataagtaatgtttccttcattcatcccaaacgcttttaagatttttttctgctttgctgtcacagcatggttcagccggtatactttattcgtctgtcgtgtcatttcaatcttctcaagttccttgattgcttccggaactgtcatataattctatttcttctcaagcttttcattctcttcctgtaatgcagtataaattttgtttcgaattatcaatgcgatgaattgtgtgaaaattcgtccttcaacgccttcgtttgtatgtgaacgcatgctcttgtttccaaggaatgatttatcagaaacaaaaagtttctcagatacatcacggctcttataaagatgcagtgcttcctttgcggtcatcctttcggatgtaataataacaaagtacccgcataatgatatttcccgtttatcagcatcttttgagatactgtgataaatatgaatgtatctcttttttcatcaccttcaaataaagtctaatgaaaccgatttttttataaccataccaagtgattttaccaagcatggctctaagctgtgatacgtcattaatacttccaggataggcttcgtaaaagagtggttctttattcttaagatcatatccaactgaatagttgatgatagctgaaccgatatctgtcttgacatgaccgaattcagccagttcaatctccccggcctggcagttcttattcgtagaatcataggaaatataaatacgttcccttcgattcctttttgcattccattcatttagaaagcctgtactcttatccttagtgatgctcttaaagaaatcacttactgacgcatcactatagattttcatacctgataaaactgcatctggaaagtatttcagaaaagcgtcgttaggaatcatcatcgtgtcatcatctgcacatttttttaatggaatcagactctcaaaacaaaacatattcatatagttaaagcgggaattttcccgcttttgatttgtctgttatttaattgttcccaactttcttaatctttctctcgccttatttactgctctcgtatggtttgcaataggtgtttccgcttttttcaatatttcttttgccttttttcctgataccaccataattgggctttgagaattattatacatactaatcactcctctctacctcacgtaatattgtttcaacatctttaaacataaatttacaattaccaacatattccgaatgaagtgcttttacgttagataataccggaactatagattctgcatcgtcctctatcgtttcaaatcccattcttttatacgaatctattacttttgaatcattaaatgcatgcaaaatgttccaattccacatagggaattattttttcgacatctttttcctggatatgttcaggatccgtttcttcattcatcttaacgatcatacacgttgtaattaacgtaaaatatccaactattatttggttttcattatcccatattatataaggttttattcgtccattataatcttttgcaataaaattttctaatgctggaagccttttgctttcagtttcagtataatcactacttcttgatttcattataactgaggaggcattgtagaatcaagctcttctataatattttaatgtactttatatactctcttttattaacataccttcttatattttcttttgtcatactatcatttgtgattgttatggaagatagtagcgtgaaatctcgctactatttatcttcacatattcttatctctatatgctttcctaatgcattcgcatacttctccaacataatcaatgttggggtgcagcctgccctctcaaatctggcaatattagatgctcttactcctgttatatctgccatctcctgctgcgtctttttctgacggtatctttcttctaccagttctttaatcacctgttccgagtccttctgtaccttttcctgaattgcttctgcatacactgccagacgcttttctcttaattctttctccgcttcataaatctccactgtattatccatgccacttcaccccatcaaactttttaccataatatcatctatgatatgtctagtcaatatagtttcatgtgttaatacttttttaaatgggttcagactacaatgtggtcaacttattcatgttgccaaaagtgaattccgacaattttcacgtcctttacgcggaattggtgctattcattttggatatcgatagtttcttttaatcaaatattatcttttgacagatttcttctctgcctttttggcatgtccttttttactgattttctcttaattttctatatccattttcagattttgacatttattatctaccaaacactttatcgaacaattaacttaataactgaatattccagtctcggtgtccatgcagtccggtgataaggaaaccgattgacaattatgaagaatacaagaaatctcacaaatgtaacgccggattatgtctcgcaaatcggctctgggcttgacattcgttcgattccttatgagtattaatcaagccaatcaatggtggtttccgctccggaataccggtttccatattaccggaatctgggtttcttgagacaagaatatccaataacattgccttttacaccatatcttataagagcagtatgctcccataagataaagctacgagattgtgctgttcttccgctcagaaaatgctttttttagataagctacgctgtcaggaaggaaaaactgccgattctatcgtgcagtttccaccgctgacaattcgccgcttcacactttggtaatacggatgattacctacttacctacgttccactatgcaaatccaatatttctctcatttaacgttcctatatcttctcttcgcattaaatatactgtcaactttataataaaaaaatagtatcctatctgattcaatgatgccactctagtaagttttccattttttaatccagacataatcagctctttactaaaggtgttcattatttcaaaatttacgtaactatttattaaaatcccttctggaatatacatataatcaatcactttgtttttctttaattcaacaaaatttcccttaaatgacgtcaaaggaaatactggcacaagaaccaatttatctttttgatctatatgacatgatgtagataaaactaatgcatcagttttaaacatcttttggtttccatcattgtcaaaatagtaaaatgggactgctgaaataatatccccctgtgaaagctcagacaaaggatttgctgtcaaatattttatctgctctccatccttttcaaactgtgcaattgcttcttgcactccttcttttgttcccattggcacagaaggcaaaatactatctacaaaatcaattaattcctttaacataaatcgaagaaattcacccctgtatcttttgaaatattcctaatatatttatttacactttctcgttcttctgatgttgcatctctcattgttccaaataattctattgcctcattttctaatctggttttagctttctgtttataataaatattactattccttaccacagcagtattgtatagattcgaagaattttcatcataatctctataatgcgcacttggaatttgataattcatattaacaaccattgtactatttgtattcattgttgataaagcaagtcctataacacaaactgttccagaaatattttttataaatctattttgttccatgttaatattctcctttctcaatcaatgtcgttagtttattgttaattacatttcccatagactcaattaaattatttaacatactactattcgatttataatcaacatttgtattaaatccatatctatcattaatatcaacaattgcacctattgactctgcaatttgctcattaattcccaacgcacccgctttattaccatctgcttccggtttaaataatcttgcattttgtaacataatatttacaaaaacattttcgttttcaacaaaagtatactttatattaatatcgtaaatattgccaatcttttgagaattcaaaagattacgcgaaagcctctctgcacctttctctttgacttcatcatacaatatagtagaaaccaatccaacatactcatatgtgttttccgttaaaaggttcaaaaattcaaacacttttgacattctttccactaaatactttgcgcatgcatcccattctttttcaaatccagcatcataatgaacttcaaatgtagtcgcgatcggtgaaatatttaattgtgcatgttcatttaatgttttaattatgattctaggtatctccgcaggtgcgtcatccggaactggcaaaactgcagcttcgttaaaaaagtcttttaaaatatcttcattattgtaatatacctttttaattccttcaatttttttataattaacagtaattgatgttccttgtattagcatagcgcttcctccacttcgattatattataataaataatatattaaaaatattataacatattccgaacattttgtttcacatattttcaattttctttctcaccctaaaataagtttctaaatccctccgctctacactggaatttattttttcaagtcagcataaaattttaatggtgttagtcaccttctggttctttttggaacaaaaagatcgaacctttcttgaagacctgttaccatggtcaaaaaaacttccaaaagggatccgaaaacaacagtaaccaggaaccgccaattacggcggttctcaatttttcaatgtacccgctattgagcgtttacttatatgctaaagttaatgccattataattcctagcttctattcaattcttcaattaattacactctatataggatttgcaaatacgaatttgttcgtttataaaaatttaatggtgcctgacacctttcatgcaatccaatatgatgtatttttgataaattcatttttctcacgctccatttcttttctttccatcataaactatatggtggtcttcaaaaaagaccgtgtgaacttctggagtttagtttgtccacacggtcaatcttatttcagttttcaagaatctcatccgcattcatgccgcttgacaacagctttttttcaaaacagcctctatctcatcttctttgcttcttctctttcagatcagctttcaaagtgtcaatgttggcggtgatggatgcaatctcagtattcagagccgcaatagtttcctgcttttctgcaatctggaatgtaaaatcagtcttgggggctgaattagtggcgtgcttgggacggtttttgttgccttttgctctaggcataggtgataatctctttccttttatagtgatttaagtatagcactgtgttgggtatgtcactgtctaataaatgaaccactttcatctaatgatacaagcaaaccatcaatacgttccattttctctattggaatgtatgcgtattgattatagtaatcaaccacttcttgccatccattatgtagattcatcaaatgctggacgccttttgctgtatacgcaactgaataataacattctctaagttcatttgtttctaacacttgcttctcatatgccacaactgcatgactaccactttcaagaatcgttaatactttctcattctctccgtaaagtttgatgagccaataagagtaaagtataatcgaataatacattcttataccgggatgcggatgatcatattcatcgatatttttcgtcatataatttgaaaaatctctccccgtattttcagcaaatgtgcgaaaacaaaggtaatttgaaatgaacattatatcaaaatttgcgatatttgctttaatatcatcttgccattgctgtaagaaaagcatagactgtactgtagctgcaaaagaatctgcatcatattctctcagttgtatattccaatttcttgttctcttctccccatcgctaatgttttccattacagaaaatctttcatcaatactattttcacatgcacgatctttaagatgtccgtgtgcgatatgtccatattcatgggcaatggtaaagttaaccatgaagaaaaacaacatatccttaaaataatctttatttccttcaaaaattttgaagaccgaaaccaaattattttgatcaacaaattcttctgcctctttccacagcatcgttaatagccctactgacaatgcaatataattttgtccattttcataatgacaaaaagcattaacttctatgttatcatatatccacaatgagattttcattttattataggtttcttttgcagtccacgttggcaaacctattctgagctcttttaatgccctatttgctttttctgatactgaatacaaatcttctacaaactcgcttagttcaaccggtccatttgaacacgtaatcgttactctattcatgtcgcgcagatccaatctcagattattttgtataacaagtctcacatctcagccgatcatagatcgttgcctgctgcccaccacgaagaggtgtgtgattatcagagcagcgtagggagctatcgctcccagtatatcacaatttcatccagttttacagatactttcttgcctttatcaccgcacaatacatcaatccgccaatcactccaccgactgtgttatagaagatgtctgatagctgaaacgttcccaagcgaagcaataattgtagcatctcaatgcttatcgaaaagataaatgctatcttcccgctataccacagtatcttcttccaactgtttcctatcttctttccgaacgtccacatcactactgctgaaaacggcaccatcatgattacgttctcgatgcactcggtggtcagcttctgttcaccgttcactgtctcccagatgccccagccgcccataacatcggataaaggattcatccatagctgacggtttaacagggttcggaacagaataagtgaggtcacaaaagataagaaaaacaacctccggaagaacacgctctctttgaacttctgataccaggtcactatggcattcttccagcctttgccagcatgtattggctcataagcataaagatagaaaaacatggcaaggaaggaaagcaggagtgaaaatccaaatggctcatagagagcagtcagaatgtttgtgatgatctttccgagtaaatcaatcatttctttcatcgtcgtttacagatcactgaacaagtcagccttaattcccattccgaagcggctaccgataccagcagccatgataagtaatgttgttttcattgcctttcctcctcatttattatcgttgctaaatacattcttttccccatgccactttaatccttaatgcttaagtcctaccaggttccatctgccagttattctctcagtgtacttctttattacaatcttctcatattctttgaaattattttagcgtgaatattatataactattcttcattattaaaactattgcaaaataattatgattcccatatttccactgttcagattcagaacgccacatatctgcaatatatcaatatagaaaaccatatcttaaaacaagcaactaaaattatatttttcactttttctcagaagttaagttttaatgccttatcatgatttttagcctttgttttacaggggacaaagctcttctaattttttcaagcatcttcattgatccgtatttttttaaacaatactcgaatcctttttcagcaatcagcctttgaaattcttcatagtgaactggtttaggtgagggactatttaaatttttctgattaatatcatttaacgaacattcgattatatcaaattcattttttactgtttcaaatattttctttcccttttcggaatttatgataacagatgatacacccaatttatcttcaaatgtctcatttgcatttttgatattccaaaagtctccaattgttatgtctccctgtcgttccatgcttgagaatttacatgaataacaagaatctcttaatatataattattggtaaataaacgataaaaattatctacccatataggagcatggtatattcgtccattttcaaatttaatatataattcttgatttctccaaccatacgctttctctcgaaattttagttctgttatttgagaggaatacagcttttcttttccctttaaaaatgcgtttaataattcactacttggtacaccatgacaaattaaatccaacgtatataaattatcatattcttttctcaaatatttcttcaaaccagctacctcacatggcgtacctgtaaacaacacctcttttccttccttcagatctttctgtaccatacaaaaaatcgaatgtttatcactttgtacatatttagagccttgaaatttccgagcatcttcaagcgttgtcgctcttccatgttttacttgaaaatcattgttcatctccacaccatacacaacgccatcattgttcaaaatatattttgcaacttctacaaatactccacctgaactactttttgctcgttcatgctcatctttattttttactccataagctattttttcaaactttttattcttttctttatcttttaatggacaaaccttttcgcataatccgcaattaacgcatgaatcttttctaatttcaggatacaaatatcccttttcatcatgtttcatataaattgcatgtttaggacaaatattcaaacatgctgaacatccacaacagtcctctttatttatatataacttttccatcttattttcctttcatatttctcaatcttataagtatcgttctaaaattgtctcttgcaaatataatatgaaaaatacaaataaaaactaaactataaattccaacacagattgcgtaaacaaaccatgtaataagacttgttggcgtaaactttattagcattggtgccgtaacatatattactataatcattaaaattgcagtacaaatatttaacaaagtactttttctagtcatatgtgttaccattttgggtataaaaaagtacaaatcaatacaacgatataaattagataagcaggaagctaacatgattccagctaatccccattttattccaaagcaaatacctcctatcaataaaatagctgcttgaaccgtactttgaactcttgtttccttatataaccccgccgctatcactaacattccttgaggtgtttttagattgtataagattccattagctacaaataaaatagcaagtgtaagatttgtatattgaatatcatcaactccacttgtatagacccctacaaacggtaggattgtaactaatgtaatagaatatataacgctaaccataaaataataaagatattcgaaatcactatatgccttttgaaatgctgtcttatctttcttaacaattaattccccaaaacctgctgagacacccgtagaaaatacagacattactccattaatcccagacatcaccatattataaactgaataaacacttaccattttaagagatgaaaaaatggttgtcataactgctggagatgcattttgtacagtttgaactatctgtaaatataacgcactccatctcttatccatcgcaccataatcaggttccacgtcataacatataaagtggtaattagttttaacatacacatacaatattaatgttctcacaagtattgataacaatgcaataattctcaacaagacaatattaatatgcattattgataaggccacgacaatgatagtatttaaaactgtatacacaatcgaagccaatgaaattacatatgtcctttgatcagcagtaagcaatgctctgtattttgccaaagtaaaaaattctaacgagccattaactcccaacacaagaactaaaacgaaaatactagtttgatctaaaacagttgaatctgtaataaaaggataacatatagccaagattacaaccaaacctacaaaaatgaatcctgatttcacataaaagtgcttcgcagcaactactatccggttaatcctattgtagtctttctctgcgataggtttgtacaaagaataaacagctgcacttgacaaaccagcctctactagattgaagtaactaataaactgtagaatagatgatatcaagccattaatttcagatccatatgctgtcaacataaatctaggagttataaaccctgcaatcattgttacaacctgtaataatgctgtcgtaaccgaattcaacataaatttttttgagcgtcccatattttaccttgcctttattcctaacattcccataatatagtatattttttgtttaattccgttttccccaactacttttaatttgttataataaatttttacttcacttttcattctgtattcatttgccaatcgaagataaaaacgattaaagtgtacaaatacttttcgagtgtatatattctgatcattgaagtcacatatattctttacaagatcatataatgtattttcatgttcttgaaatcttcggattgttttttcataattattattatcttgattagaatgactgtttttatgtagaatatacttatataacgttttatcaatgtatccaatttttttttcgtgatatgcaactggcaataaaatctgataattctgcccaattcggctctcatttatatgtctacttggcacatacttaaaaaatatatctgttctcatgatataaattcccggacaaaatacaacatttttactgaataataaatcttcaaaaaaattatctttttcaggtttaattctttgtaaacgctttattacatttccactctcatctacataatcagccccagacattgccaatggaatatctgggtgttgttccatgtatttcaccttttcgctaatattgtttcgatacaattcgtcatctgaatctggccaaataaagtattttccttgaatatatggaaagcccaaattcatagcctttgcttgtccaccattctcctgctttaaatacacaaaacgaatgtttctttcttcaaatttctccttatacttatagacaatattttcagttctatcagttgagccatcattaataaaaattatttcatatttttcataatcctgttccaaaattgagataaaaaatgcatctaaatatttttcagaattatatgatggagtaataatactcactaacggttccactttaacacctccactcaaatctaaaacttccatttaatagttcttttactgaccatataagaagaatccgctacttttatatttgaaaccaacagaataataataatcaaaacaattagctggcatggataatataatgtatttccagtaaaactatagactccaaacaaaataatccaataaatcaaaagtatattccaaaaaacaggcttttctttaactacagatattatcttgaacagcatcaagataataagtaatgtcattaatagaaaaccaacgattccagtttctgccaaaagctgaatatatacattatgtgcctgataattccaacgttctccataatatcgaaatcctcgataaaaagcataatcattaaacgataaaaacccttttccaaacaatgggttttgccgaaacatttccattgcataattccaaaacacttctctacccgaaagtacgtctccttcattattcacaatgcgatcgatgattaaagacgcactaggaactagtacatatgcacctataataaatatagtaattcctaaaccaacacctgccaattttataaatttattgtttttagaaaaaagtataacataaatcagcaaaactgctattggtataataaaaagcgtcctttttcccgtcatcattagagctaccattacaataagactctgaataatatatttatatgatttatgacagatatattctgcaaaaatcatccctagtcctagattgcagataaatgccgcatatgccttttcaaaagcgagacctgcgattgctccgcctgatgtaagcgcacgcatagtttcatctccgaatgacgcaaatctaaacaatctatgaaaaatatccggcgatgccgcttctaaaaacatagaaaaaataaatatccaaaatagcgccctgaagattttcaataaatagcgataaaatatttctgaaaacctaaaaaggacaatacttatgcccgaaacaaagtatatactataatctatagatccatcagagctagaaaaccaaatgcaaccgacaagtagaattgaaacaaatgcaacatatagacctataaacttattcatttttactgtataatctttttttgaaacgaacaacacaaaacacaaaacgattatgaagagcgataggtgttttgtgtacatcatcaacttgttattggtagaaaaaataaccagattaataagtaaagcaattattatttctaatgttttagtaccagttaaattagaatgaccttccatcttcattcaaaaccctctcaaaatactgatttgtttttatatattgttttctgatctgatcatcagcaaaattaaaatctctactaacatttaatctacaatcctctaatgttttcaccttacatccatctaaccctgttaaacataacaaagattcgactctatcattaggcttaaaatctttttgtaatgcttccacataaaaatctttatgaaaaataacagagaaggctgttccatggaatgaattagtcacaacatagtcagcatattttatatatcccaaaaactcttctactgatgccgaatacactccttttatatccggagttttcatttgatctactacatcaaaattcaacgccacaatttttctgcccgttaatttagataattttcttgcaaagtcaaaaatcaaattcgatgtattcaatttgtaaattaatatataattcttaagtttaggtttctttgcaagtttttcccattcttctgcggtcaataaaaagactggatccacagataattccgaatcttttccggttagtttttttacaatctgttgtcctgcattttcacggatagataattcagaaaaagttgatagcaaacttttataatcatttacatagctgtctggaatctccttcataccaaacgaagcagcataggaaagtttgttatcacaattttttacaaattgtaaaaaatatgttttatcgaaatctgtacatgcaaaattgaaaacctgatcgcttcctgttataaacttatcgtagcgaagattcgccttatctatattaaacttatcataaacttctgtacttattcggacattttgatccaaaaatctgtaaaattctctttttttcttatatgtgtttttaaaattcaacattcctctaataatctgttttacagacttgtcctttattgtgaatgttttataaaaattttccatatgttcacatcgataatctataacctctgcatcatagttagaaacatttaaaaatttctgtaatgcatatgtttgcaaaactgccccataattaattgctctgtgaaacgtaataattcctattctcataaatatccctctataaatcaatttattttagatagtatctcaaaaactcgtatcaatttccatttaagcgaataatatacaacaatatttttcaaatttgtcggctgatataagtcaataacacgcattatctcctgatcattcaaaagtattctataaaagtctttagcatctctcgttttagaaatcttatttatattgaatctcaaggtaaaaaaagtccgattaattattcttcgtttcaaattatagtctttcaaaacatctccaaacagtatgcaaacttcattatataaatttacaattctttttaagacggatacatcaattcgatgcgtaaacgaagtgtcattaacacggtataaatatacagcttcagtgcaaaaggctatttttttagcatgtgtcataaacatcagcttaaataacaaatcttcagaataaacatctcgttcggaaaaaaattgtataccctcattttcaattatatctcttttgaaaatgctatcccataccgcaatacatccagagtatccatctttctcttcgtaagaaatcatatcagccattgcagccttaatttctttgcagccaattaaaattttatcatttagtggatgttcctttatgatctttccatcatgcatatcaactattctacaagaaaccatatctgcatttgtttcaatcgctctttgatacagtttttcaagcatattctccttatactgatcatccgaatctaagaatgcaatatattcacctgtagatttttttataccaaaatttctttctaagccttgccccacatttttattagtatataattgaatcctattatctctttttttatatttttcacatatcagaaaagaattatctgttgaaccatcatcgattaataatagttcaatatctcgcaacgtttgattcaatacggactcaatacattgctccagataaagttccgcattatatattggtacaattacactaatttttggtctcattcatcattccccatacactatcacaaattctagtttcttttaatgtcatcatattcttctttttaatttgattctggtatcaaataattattttgtattcttctcgtcacttgatgtaattaaataatcataaaagttatgtccgtgtttaatatcagcatctaatttatatgtcaacttatgaatacctgtaagttttttgatccaattccatttctcttctgaataatcatcagctaaaaccttaacaagatactcgctataatcactgttcatatagggaattgctttctcaacttccggattactcttcaccaccaatgttataatcaaatttggtagcagatactcaattacatgttcgtttttgagccaatatgagaaagcaacatttcttacttctcgaatagtcttatttcccttttttgcatgtaggaaccaagccggatacagcacaggattgtcaatcagcaacaatgaattacgcacagcgaaaaaatcactgtttaggatcgtatctggaagtggttctgtaaggtacacagttgaatcgatccacgttccaccataatgttccagtaatgcaaatctcatcagatccgcatatccagccatcggaatctggccagcgtcctttttcttttcaatgtaatctggcaatcgaatgtaatctgcaagattttggtcattcagcaaaatgattttttgatttgaatgtttacatacagattcatagcacttttgaataatgatcggtgcctgttcaatacctttgttccaataaatccaaatcggattctctacatcattttcgggaaaactaagcccctgaacatctgtgtccttatactttaaatatagttttatcttggaagaagctcgttcctgccataataccttccgcacctcataatccttgacaagatgcaatttgataaacataaatgcccctcgtttgacggcattaacaattccatatctttgaataaagcctttcatgccaatattttgatagtagtcattcagcataataattaatttaattgtctccctttatcttgcagaaactactattcaaaaggctcatagattccgcaccagataatggtaaactgtttcctccttatcaatagatggttctaatttataggttagtttatgtatcccagtaagccgcttaatccaattaaatttttcctctgtaaatttatctcctaatactctaaccagatattcgctgtagtcactattcaaataaggcatctttctctcaacctctggtgataacctcattatttgtgtgattacaatattggaaaacagatattctggtacatgattatttcgtttccagtaagcaaataggacattacgaatctcacaaatcgttctattatgttgcttggcgtggatgaaccagaccggatacaatacgggattatcaatttcaccgagtgaattgtgaaacacaaaaaaatcactatttaatatttcctgtgggatttcatctgttagcagtattgttgcatccatccatgtcccaccataatgttccaataatgctacacgcatcaaatctgtataaatcgctaatggaaggactccgctttttaatttctcattcagataatccggcatatttatatagttctgcacattgttttctgtaagcaaaacaacttgtctgccggcatatttttttacagattgatagcacgtccttactatctcaggtgcctgctccaaccctgtattccagaataaccaaataggttcatctacttgggtttctgggaacgtcagcttttcaggagcgatatctctgaacttcagatattttttacaaaccgctgtgccaccccccgattgccaaagcagttttctcagctcataatctttgacaatatgaagtgggttacgaagaaatttgttccacattcttttctcctcgataaattttcatcagttttacatagtagctctctgtcgtttcataattcacctgactacaattctttgtatatctttccaatacatcttgtgtttgaagaactttctttatcgccttcatcagttcttccacattacccgcttcaaacaattctccggttttaccaggctcaattaattcggggatacctcccattttagacccaacaacaggcgtacccaaaagtaccgactccataacagagtacgggcagttttcataccattcagacgggcagacactgattgctgcctcagcaataatgcgatagagttcttctccagtcttaaatcccagatacttcacattgggaatatccttcattttatcaactgatgggccatagccaataaacacaaattctgtatttggcatcttcttggctacttcaagcaaagtatctgttcccttgtctcgcgacagatgcccaaactctaatacataaccctttttttgaatgttatccaagtgcggcatctcttttttgaaattatgcaacccgatggttttatcacggaatcttttctgcgtgtccagctttgatttaagaaaataactacagcaaatataggcatccacatatgagtatgctttactatatttccacatatatccatccagtgttccaagaagactttttgctctggaatttttcaagcatttagtttgaagacaatgaatataatgaccatctaagcatcgttcacatggcttcatgttcacatcaaacattccatggctgggacaaacaagttggtaatcatgtgtcgtgtaaacaatcttacattctttttttgtttctttacgccatttgttaatttccaaaataatagaaggggtcaaatgatactgtatattattgagatggactacatccggctgaaaatcatctaaaaccgcacgaatttttttgcgcgcttctcttgagtagataatacgaaaaggcgcatttaaatttgcctttatcccttgagaaaaatccatattcgtcacatatgagcccactcgatttcctactgtatttttttcattctcaagcccgaagtactggacttcgtgcccgtgttcttctaacatttttcctacatcgaatgtgtacgtttccgctccaccttttggaaatataaatttatttacaagtaaaatccgcatatcttaacttccttactttcattttctcctgtacaatttcagtgtttcttccacaacatcatcccaattatattttttgcaaatataatctgccgcctgttgttttagctccattactttttcagtacgatcacaagcttcttgtaatttattctgtaaatcttgtacattcgactttttaaatatcagagctttatcttccacaacctctgtacactcttgaatgtcagaaaccaagcaacaatttccatagctcattgcttccaagaggctcaaaggcattccttctaaatcagaagggagtgtataaatataagcattactgtatagttcttccaacatctgaccttgaacaaatcccgtgaagataattcttttatcatctttcgccaattcttttagctctttcataaaagaatctgtatcacttgatccaccggcgatgataagtttcttttctgtcttaacgttcttgaaagcctcaaccaaatatcgaatacctttttccggtactaatcgtccaagaaataatatgtaagaatcttttgtcaatccaaatttatcagtaatcaattctgcttttctaatttccggtcgattcacaccgtttgggataaatcttgtctctcttccatactgatttctaaagtaatcatgtacgcctttgctcaaaacgatgatttcatcagcatatttcacagcatttttctcgccctgtttgataaacttagatccgaaacctgatttccatttttcacgttgccagtccaaaccatgaaccgtcactattactcttttccctaacaacttcggcaaccatgaaaaaaaggctggtccttcggcatgaatgtgtacgacattatatttcccaaatgcactataaagtgccgcaaagaatgatgagctaacagctgcaagacctttcttttcgatggttggaacgcatttctgattaattccttcgtattcagttttcttatcatattctgcaccactcacatgatgtcctgatctgttataacaagtaactgtataaccattctttgccattcttgtgcaaagctctttgacaacaatttctattccgccttctctgcttaatcgtttttgtccaaacatagcaatcgccatctttttactactcatcacacacactcacccgaatctccccatcctctttcttcacatcaaacacaagcggatgctccttcccccactccggatcttccttctccttctcattccattccttccatttctgaatgaaaccattgtggatcaggttctccgctgcaagtcttgcttgcaccgcttcgtcataattatcaaaaagaccaacataatagcgctttcccttgaatccgatatccacacgataccgattagaattcttcaactggaaaacgccccggaaaccactcatgttatcttttctgctttttcttttttctagtacttcaacacaggttccatctacgagatgtcgtctctgcgcaatttcctgacggttcttcttttgtaaacaaccgcagctatgataattaccatgcacaagacctgctgccgtcacgtcaacttcatttccacaatcacagacacaatgccaataaacggatccccgtttatctcttttctccgtcgcatacttggctgtcaacataccgaactttcttcctgacagatctgctggtcttcttcccataagccttcaccctttttgcaaaaaatttcgtagagtagattactctacgaaatacgctttttctttaaattgtttcaaatcttagtataattatcgtgttcagtctactcttttcaaacatttctgtcaatctatatacgttcatttcatgaatttatacaatctcttagcaaaaaaagtcgaaaaataaacactttcgacattttaatctccttttttgaatggatttttatctattcgccgtcaaatttatggtcaattgtcagtcaatttccaatctatccgatcagaaaatttaaaatagttatcttaatttatctaaatcacttcgcgcttttaaaatcacatgtatttaaaaatcaatcataattataaatttcacagcatttatttaccgtcaattttttggtcagacacctgaaaactattgatttccaaggctttccgtaaaaaattcgtagagtaatctactccacgaaatacgcttctttttctattctgaacttctctttttttccccatacacctcaaagaaaatgccccggattataaatacaattattcccacacggctgaccatcaaagattttcttattcaattgatcgatatatctccctgtctcttttttttctctttgatttccctccagaacccccagcacagccttcagattccgaatatcccggatcatatcttccacataatttcctcgtcctaccagtttcagatgggtaatccctgctgcctccagctgtggcagcgcacacagagcacatccactcttcccgcagagatattgttgctcttgttgctcttctatttccaatgttctttttctcactcgttccatacgctcttccatctcagcatctccccagtaggtcgtcctgcacagataacccatctcgtcacagtgaagggaattgcagaatgctcctgtgaactgacacaattcgttcaatgcaaaggcctcgaattccagtttttctgcatttacagcttctatcatctgccgcatcgatgcaactgtatttttcctgtgaaagattactctgtcgattcccattttctggaaaactttaattgcctcccggttcatttctccggcttcaccgctgagatggatcttacaggatatgcctttctgtctcaggtacaaaatcaatgctggatcggcaaggatgaagctgtcgaatccgattttcatacactgtttcacaatatctgcaatctcttcatattgttccggaatataatagagagaattcatcgcgatatgcaccggctttctgtacttcctgatcattgctgagaggatctctaattcactgaaagaaccgagctgcacattataagccagcacttccctgcggttcagtggaagtacagttccgtatttttttgtccagttatatggcacatatccgcagaacaattcgtctgctcctgccaggacgtatggaatatattcatctatagagccaagtcctgcaacgattttcatccttcgctctgctttttctttttcattctgtttccttttctgtgtctccattcttccatcatccttctgtttttcacatttcacaatagattgaccacaaggcggttccattttattccgagttctctcttcaactgctccggttcatccagcagatgtttatccaatgcgaacagactgttgtattttcccttcatatataaatgctttggatagaagaagctatgttccagacacggtgccggacattcttgtctctcactttgttttccacgttcaccgtgttccagcacagcgcaaagtgtacaatagctcgacgtatttgtttgatagaacggcacgtgtagatgattctgtatcttttgcggtatttcctgtgtataaccgcagctttcccactcataaccgctgattccaaagctttcttccagataggtgcgataaaatcctgcattcagattattctgttccaacagcgtcttatctcccatcttgtaggacattctcggatctttcttccgcttatttaagagcgtcccaagacacgggatcagatgttctgtccgcttcacaagatgtgccagtccccaatcattgactacaacctcaagtcgtttcttctccgcaccggaagtctcctgttgttcacaccactgatccagacgtgtcaacagttgttctgtctgtgtaagcctgtcttcccgaataaaggaaaaagcgacggtcacttctatccgttctttatctgctttctcaagaagtgcaaagaactgttcttctttcggaaatagatgtggacagaattggttgccgatatacaaccggtccggttgtcttcccaggatccgcgcatctttgattccatgctgctgccagtattctttcatgaaccgttcaatcggtctggtcagatattgttcgtatagtttcggatgatccagttctactgctaattctgccggcagattttggaagatctccgcattctgaaaccactttttattttgttctatttcattcttgaaatgttcctcttcttcctgtgcgggataaccggtcatttcttgtgccagacgtgcatcatcctcttccagcttgagcgaaatgtatcggctgtattcgacacagagcttctgaaaggcttctttataatcttcctgaactgtgaaaatatcatagacttgatagaattctgtctgttcccctgactctatctgaaaacgacgaatttcaatctcccgatactctgcctgatccatctgatagaagcagatcttgaatgctttcggataaatgttctcctctgctttccctctcctgcaaagccggatgcggaatccttcggatgaaatctctgtcaggcggacttctctttgcctctcttctattgaatcttctgtcataactccggccagaagaccatatggaatcatctgaattcctttgatccttcgctttttcatttgcttcctctctcttttacaaaatccctgcttgaacaaagaatgtgcctcggcacattcttgcgcctgcggcggtcgcttgcgacacttacattatacgccgcagtgtgcatcctaagcggagcgttttttatatattaggaaagcactttcctaatatataaaagatcgtgctgtcagcagaactctccgccgacagcacgattcctatactttttacttatataattcgattagatgttcagaagatcactgaatactctcagggctccgtctgtctcatgtgcaagtacgcgttttgcaaggactttaccgagctgaacaccttcctgatcgaagctgtttacattccacaggaatccctggaacatgatcttgttctcgaagtgagcaagcagtgctccgagagatgctggtgttaactgctctccgataatgatgcttgaaggacgtcctccttcgaagttcttgttgcggttctcgtcttctttaccacatgcaaatgctacgatctgagcagctacgttcgcgcagagtttctgctggcttgtgctgtcctggatcacaacatctgtaccgatctggctgttcttgaatcctacgaactgaagcggcacaatgtctgttccctggtgaaggagctgatagaaggagtgctgtccgtttgttccaggctctccgaagataaccggtcctgttacatagtcaaccggctcaccaaagcggtttacggattttccgttagactccatatccagctgctgcagatgtgcagggaaacggctcagtgcctgggagtatggaagtactgctgtgcttgggtatccgagtacatttctctcatatacaccgatcaatgcatcgagcatctccgggttctctttgatatttttattgagggacagtttatcctcagctgctgctccatcaaggaactgtgcaaatacttccggtccgaatgcgagggaaagtactgctccgccaactgctgatgtagatgagaaacgtcctccgatatagtcatccatgaagaaggctgcaaggtaatcatcactctttgcaagtggtgaagtctcacttgttactgcgatcatatgcttggatgcgtcaagtcctgcattcttaagagcatcctttacaaaggactcatttgtcagagtctcaagtgttgttcctgacttggatacaagtacgaagatggagtgagcaacatctacagaattcagaactgctgccgcatcatccgggtcaacgttgctgatgaactttgcttccatcttgaatgtatcattcttctttgcccagttctcaagtgcaaggtacattgcgcgaggaccgaggtcacttccgccgataccaatctgaacaactgttgtaaacttctctccggcaccgtttgtgatctcacctgcatgtactttgttcgcaaattcagcaatcttcttctgctgctctacatagaaagtacgcttgtcaacaccgtcagcctcaacggcatctccgagctgtccgcgtgtcatgtggtgaagtacgagacgcttctctcctgtgttcacaacttctccgttgtaaagtgcttcgaacttctctgtcagctgtgcttcttctgccagtttctcaagagctgcgagaactgtgtcatccactttcttcgctgcataattgtatgctaatccttctgccatcggaacgctgtagttcttcacacgctctgctccgttctctccggccatcactgctgcgaggtctacactttctgtcttctcaagttcctgataagaagtaagcttatccaaattgttccaggtaatcatcgttgattcctccttcataaaataaagttcatatccggctgtcgggttcagtatcttctgaccggcagaccatccatttcataaaaaacctattgttaatttctcaacaatcaagttcattatacaatcaatccaatgcaaattcaacccacaaacgatattatcagagcagctccgcaaacagacgtaagatcagctgtccgagtcttaaacccgcacttcttccttctttatactgctcagtcacttctctgctttctcccatcgtgcggatcagatcatcccggatctccagcactgcgtcgcaatctgccaggaagcatccattctcaaagtgatggtacagactgcggtaatcgagattgatcgttccgcaggttgccattttatcatctgccacactcatcttcgcatgacagaatcccggtgtccactcatagatacggactccatgcttaaccagattatgatagaaggaacgggtcacactgtagaccatcttcttgtccgggatacccggtgttatgatacgtacatcaacaccacgctttgctgccagtgtgagtgcatgtgtcatctcgtctgtgataatcaggtatggagtgataaaccaacagtatttctctgctttattcgccatactgatatatacttcctcgcctacctgctcaccatcgagcggactgtctgcatatggctggacataaccacgctgttgtgctttatatgcatagtggatcacatatttctccggtacaagttcttttgactttacatttccggctgcattccacatttccagaaatgctactgtcatagacttgaccgcatctccttccatacggatcccggtatctttccagattccatacggatgtgtgatgttgaaatactcattcgccagattgtatccacctgtgtaggcaacctttccatcaatcacagtaatcttccggtgatcgcgattgttcaggaacatattcagtcccggcagaatcgggttaaatacacggcatttgattcctaaagatttcagttttgttgcaaaatccatgttcacaaaccagatcgatcccatatcatcatagaagatacggacttctacgcctgctttcacacggtcttcaagtaccgtctggatccgttgccatgcctcttcgtcttcgatggcatgatactccataaagatgaacttttctgcctttgaaagatcctccagctgtgcatccagccctttgatcgcctcatcataatatgtaacatctgtgttctgataaaccgggtaacaagagtaattcgtcagataagaagcgattgcccccgcctgcggactctcttctttcatccattcgagaatctgtctgttatccggaagatatgggagcagttttttatcaatctcttcatatcttgcccgcatcttcttcgtgcttccgttcagacctacgagaagatacagactcacaccaagaatcgggaatgcaagcatcagtatgatccatggcattttcattgatgaagtcttatccatgctgtaaagtccaagcacaagaaagattgccacaattcttgttgcccagtcaataatagttgcgtattcacttacctttgtgaacagaaagagaaggaagacgatctccagcaagatagatactgctgtgaagatcagcctctttgttccgttctctgtctttttctttccctctaatgtactgctgctcaaatctacatgccccttttctcttttccttttaataattgctattttctctttgcatagaaagacggagaatccgatcactcagattctcctgactcttttaattaacacatactataacagatatggaaggaaattgaaacaagtattttctttttctactgtttttttattcatgtctaagtgcctcgattggattcatgttcgccgctttcacggacgggatcagtccgaagataataccgatcagtgtggagaacagcactgcgatcacaatcgaaactccgctgattgctaccggaactgctgagactttggatataatgtacgcaagtgcgattcctccaagaacacctataattcctccaagcagtgtcaacaccgccgcctctgtcaggaactgtgtcagaattctgcgttttctcgctccgagtgccttctttaatccaatctcgccggtacgttctgtaaccgacacgagcatgatattcataactccgattccaccaactaacagggaaatgctggcgatccagatcagctgctgatttgtcgagttactgatctcctggatctgtgttgcctgttctaacagatcttctcctttgtatttcacggtatcatctgaaactgtcagcatagcatttaaaatatctgcggctttctctcctgccgttgtcatatcatctgtactttttgcacgcacgacaaggttctgtggttcgtcatactggtagatgaccggccatacattatccggaataatgatctttccactctggtcatctgacatgtagcggtagtaatcttccattgagttgattaccggctgggactctgctttctttgcaaccattccaacgacaacaaaaggttctcctttaatttcgatcgttcttccgatcacatctgcattgtcgaataaacttgccgctgttgtcttgtctatcaaggctacttttcgtccttcggaataatctttgtctgttaatcctcttcctttggtcacctgatatccgtaaacatccagataatttctgtcaattccgagaatcacgctgttacttaatgactttgcgccgcggtaaactgcgtcgtattcatttcttgtatgatataaagacgctgtctccacttccgggagttcaacgacttcctgcaatgtctcgtctgagatctccggcactccgtccgggagtgactgatactgcagatcgatcggccagtcaccctgatagagctgtacatttaccgcgtcatttcctgcaccgaccagattcttcttaatctgttcattcgttcctttgatcgtggacacaattgctataatggaaccgattcctatgatgattccgagcattgtgagcgcagatcttaatttatgattccagattccctgaaacgccagtctgatgtcttctaacataatggcacctcactctctttcattttgatactgttcagtcctcttaataatagtcgtacagggtatctgcttcctgtgtctttgcgccttctttgacatctctgccgtaagggaacgcgatcaggtcatccattgtgaggccggaggtgatctccagtgaattgtacatatttttgccaacctctacatactgttttgttaatctgccgttatcgccccgcttgtagacataatagcggtttccttcctcacggacaaacattttttcaagatagattgatccatcactacctgctgcaattccattcatcgacagattcacagactcaccattcgagagatttgcgtctccgtggatcacgagcgtgaacggatagaaggactgattctggttctctcctgtggaataatcgcttaccggtgagttgccaacacctgtaactgtcgcttcgtaggattctcccgactgccaggacattacagtcgcagtcattccttctttgatctgatcaagcattgtctctccgactcttccggtcacatagaaaccttcttctccaacaacgctgacaaccggtttgttctcattctttgcagacgcttcgtcagtcgcttctttgactacaccttctaccgtacttttgatcacgccgtccccgacctttttcttcagctttttcagttccagttcagcggatctcctggaaagatccagatctttgatcttctgctctttctccttgatttgcttcgtcacttcttcctttgacgggaggtccggggtgtctgggataaccggatcttctgaaatatccggttccggagttggttctggttccggaattggctctggttccggagttggctctggttccggagttggctctggatttggagtcggctccgggtctggagttggttgtggatccggtatgactacctgtcctgtttttccatcgaggatccaacaggataagaattttgtcggcgcttctgcgttatctactacatcaaaggcacacacttgaccctcttttaatactttgagcataaacggtgcatttacggctgcccccggtgcacaaagataacgatacggtttttccattgttccgtctgcgtcttctttattataaggaacagaatctaatgtaatctcactgtaaacctcttttccctttaatgcttcagggaatggacgctcaattgcggaagacggtacgtcgtcttttttattatcatctttggatgtgtcatccttcgcattatcatctttcgaagcatcatcttttgaagtatcatcttttgaggtatcatcttttgtgttgtcgtcttttgtcgtatcatccttcgaggtatcgccatccggttttttattctcatcctcttttgatgtattaagaatggttgtctttacagcactcatcttctgtaccgttggctgctgttctccagctgtgcttgtctgcacgacggatacccctgtatctgccttcgcggtctttgtccccttgagctgggtgatctctttctgcaggttctgaatgttcaggtcaatcccctgaatctgcatttctttcatctcaagctccagggaagaaagtgtcgtgtcgtatgccacaagacggtctccaactttcaccgtatccccggctttcacgtaaacctgtgtgatcggcatagtatcatccacgtaaatgtcctgcttctggttcgttgtgacggttccgtaacttgcaatcccactatcatcgtaccagccgccggaattcaaactactgacaggagctactttaacagcctttccgctgttcttcactgcgaaaccgattccaagtgcaagaacgatacagcctgctgccacaggaatgccgatctttattattttctttttattcatccacactctcctccgttcccggaactccttcctgcattgcattttcttctacaggttcttcgtaaccgccctcggctcctgacatatctgaagtactgcctgatgtacctgaatcgttcttcacaacagctgcaccttttttgcactcctcgcttggccatacaatgtaatcagaagctttcagtccgtctacgatctcacaggttcccatatcttcgttcgtctctccgagtgtaacagaacgcttctccagcttgtcattatctcctgctacccatacatatggatgatctgaatctgcgtctacaatgtagtcacgcatcagccacatcttgtctgcttccagtgaagtacttgtctcgatatagacatgctgtccgagcatcaatccatccattgtatccaatgtgacatagaatggatactttgttgcctgattatcgctgttctcagaaccataactcatagaatcctgggaactgttctccggcttctctgtgtctacgttatctactgtacctgtccagatctcatcttcattcactctggagcggatcgtcacctgtgtgcccggtgtcagatctccgatgttctgctcgcttatctttcctttgattctgtattttcctgtagaaaggatactcataaacggttgggactctcctgtagaagggtctgttccctgctgttcgttgatctcctgtacaattccggcaactgtagaagttactgtagactgttccaggctcttctgtgtacggcttacttccagctcttttactttataattgtactcttcctgcttgatctccatctgaagttcctggatctgtgtcgtataggaaagctgttcgctggccggcgcactcttcttctccgttgtaagtgtcgcgatctgtgaattcaggctgctgatgttgttcgtgatcttctcaagctccagttttccctgatctaatgtcatggcaagctcttctgtatcgtattcaaacaactttgttccaggctctacttcctgccctttttcaacaaagatctgttttaccttctggttgtctgccagtgtcagtttcaacgtatcctgtgcttcaaccactcctgtaaaacggttctgtgtcccaagtcctgtccctgtgatcattccaacggaatccgcataaagaacattctctccatctgctccgcttccacctgtcagattcttcacaaggatcagggcgattactgccacaaggaagattcctccgccgatcaacactccttttttctgttttgtatccaatcttcttttttctttcggctgactggagctctgtgtgtcggatgactgctttctgattccccgcatcttttgccctcctgctttgttttatttttcttctttttgtgcaaaagataaaatctccgggacatccggtacaatctgcacaaaatattctctcataccatcagtatacaggaaatgtgcctaaaaagacattgatattttcttaagattttttatcttttttctatagccggctcacagactccttctgccccggcaagcagaatcatcagaagcaaatctctctgtggtccaagccatgcttcttttggctcataccattcctgaagggtatggattccgtcttcttctccacctcttccaacagtgattgccgggattcccatactgatcgggatattcgcatctgtactgctctcataccgatactccggttcaatccccagcagttctgccgcccggaatgctgctttcacgatcgcacaatcctttggctgtgcccccgccggtctcacaccgcgtccttcgatctgcactttgatctgcggctttgaagcatcccatcttgcattttcttcttccactgcctgtttgatcactttatgaagttctttgtccaatcggttcagctcttcttcgctgtccgaacggaggtctaccagcatggatgcagaacctgaaattgtatttacagaagttcctccctggatcacgcctacgttaaatgttgtcttcggctcattcgggacctggaattctgcgatctgtgcgatggctcgtcccattgcatggattggattgggaatgccaaagttctggaaactgtgaccacctcttccggtaaatgtcacctcataacggtgacttcctgttgccgtatagatcaccccgcccgtatactgattatcaatcgagacaaatgcatctacctctggacattcttctgaagctttgttgtcgtatccgaacagatacttcacgccccttagatctccaagtccttcttcacacacatttgcacagaagatcaagtctccttttgtgtgaagatctgcatggatcattgctttcgctactgcgatcatctccgccactgcatgtgtgtcatcgttaatgccgggacaataataacgatttccttcttttcttatcgtcagatctgtcccttccgggaatactgtgtctgtgtgtgctgcaagcattacacttggtccttcaccggttcccggccagatcccaagcacatttccaacagcgtcaatcctgacatccctaagcccgatctcccagaaccgctcccggatatactccgcttttttctcttccttataagaaggtgccgggatctgacacatattgagcgtgtcctgagtcgttgccggatcttcttcctttatatattccaatgcctgttttattttttcattttcaagaatcatttccctgtttcccttcgttctgtgtactttgtattttgttgtaataaacacttttagtatatcatattttcttaatgataccgtgattttgcggattttctataacagtaatttttttattgaactttttcatttatcgtggtatactctgactaaagttttgaacttttaaattgaactttttagagattttcgtattgaagcagattttaaattgaactttgtattttgttaatactttattaatggggtctgatccccggaaggataaccccagaaaggagctttatggaaacctttgcagacagattaaaagccgctatgaacgagcaaggcctgaagcaggttgatcttgttcgtcttgcccagcagaaagggatcaagcttgggaaaagtcatgtcagccagtatgtcagtgggaagacaatcccgcgtactgacatcttacattttctggcagatgccctgcaggttgatcctgactggttaaacaataataatgataatgattccacactgtcagatgttgataagatacagacatccgcagataattcaggaggtatgaaagtgagagaattcaagaaatcatccaagttaaataatgtattatatgatgtgagaggtccggttgttgatgaggctgccagaatggaagagatgggaactcatgtactgaagcttaatatcggaaatccggctccgtttggcttccgtacaccggatgaggtgatctatgacatgagccgtcagctttctgactgcgaaggctactctgcttctgccggtctgttctctgcgcgaaaagcgatcatgcagtatgcccagttaaagcacctgccgaatgtaacgatgagcgatatttacacaggaaatggtgtcagtgaactgatcaatcttaccatgtctgctcttttggatacaggggatgagattcttatcccgtctccggattatccgctctggacagcttgtgctacacttgccggtggaaagcctgtgcactatatctgtgatgagcagtctgactggtatcctgatatcgaagatatgcgtaagaagatcaatgaccgtacaaaagcgatcgttatcatcaatccaaacaatccgaccggtgctctttatccgaaggaagtactgcagcagattgtagatctcgcaagagaacaccagctgatcattttctctgatgagatttatgaccgtcttgttatggatggaaaagagcatgtttctattgcttctctcgcaccggatctgttctgcgtgacattcagcggactgtccaagtcccatatgatcgccggattccgtatcggatggatgatcttaagtggaaataaaaatattgcaagagactatatcgaaggaatcaagatgctttccaacatgcgtctttgctctaacgttccggcacagtccattgtgcagacagctctcggcggacaccagagtgtaaatgattatattgttccgggtggacgtatttacgagcagcgtgaatatgtttacaaggctctgacggatattccgggaatcagcgcagtaaaacctcaagctgcattttatatgttcccgaagattgatacgaagaagttcaatattgtgaatgatgagaaatttgctcttgatctgcttcgtgacaagaagatcctgatcgttcagggaagtggatttaactggcatcagccggatcatttccgtgtggtttatctgccgcgtattgaagtgctgaaagaggcggttggtaagattggggagttcctgcagtattatagacagtaagaattcaaaaaataagctctggaaagtcaaaactttccagagctcatttttttcagatcgagggcgaaacctaactctatccaagcagttctcttaccatctctgcatcaaattcaactttctccacatgattcacctcaatctgatacagtgcattcgctgcgatgtgttctgctgcctgttccagatcacggattcctgatgtattggagtacagttcaatcacttcattgagtgcctcttctgtcataatgcactcttctgccttcaggctcatgcgtttcagcaccttcggaagtgcgaatttggagaagattactttcttctcttccggtgtataatccgggatatcaatgacagcgaaacgggacatgagcggtgcactgatctgatccttgtcattcgctgtagcgattggatatacaccaacggtaggaatcatacactccatgtaattgtctgtaaatccaaggttgtccagcagtgtaagtaaaacatctgccgggtttccgtttccctttccggatgccgccttatccagctcattaataatgaataccagattggattcccctgccatggagaatgcttccatgataatacctggctttgcgtttgaatagattcttgaacttcctgtcagctgttccggatcgttaatggaactcatatccagtgttgtccaaggaagtttaaggattcttgcaacggcataagcaatctgggatttacctgttcctgccggtccgacaagcagaagtccgtacgccggaagtgtgtgtgtacggttgatctgaatgatcgtctctatgattctctgctttactttctccattccatacagctcttcatccagaattcttctcgcttcatccggatcgattgcttcaaagtaattactcttccactgaatattcatcatgatagatagtgctctctgtgcatgacggcgctcttcctgagagacctcgtgagagcgtgcaactgcaagatttcttcttgcccacagacgaatgttatccggaagtgtacgtcctgcgcacgtcataaagtctgtaatactctgaatacttgtaagcttcatgtcatctccggactcttcctgctcgtcatcattgatcttttcttttggcgcatcacttgcaaacaaccgctcaatcataaactgaaggaagccgtcctcagcagataattttgttccgcctccaaatgcaatctcacggattctgtaaacggcataaccatccggcttattttctccggaaagacgtacattgatgtgattttctccaagccattttaaaagactgacaaaacgtgcatccactttcaggatatctgcgctgcatgttccgtccttttcatcaaactcaaatgcggtctgcttattctgattggtaaacacaccgcaggaatgatggttccacttccggttctggttatccagaacaagaatcggacactccggtgtcgcatggtcttcgttggaacaaaatgttgtataagtacactgaacttctttcttatcttccggtgcactgttaaagtcaaatactggcatactttcatctcctcgtgttttgttttcagaaacattactattctaccacaaactttttgaaagaaaaaggaagaatattatgcatattccaggtttatttctatcgaatatcttaagatatcctaaaacttggctacatttcttgtaacttgtatctttttatgatacgatacttttcagaaggatcttgtcaacttctgacatttttcgaactaattcatgcaaaggagaatcttctatgaaaatctgtccaaaatgtaattcactctgcgaagacagtgcttctttctgtcaggaatgcggtgctccgcttcccactcctaatgataatgctcatacacaggagaatcaaaagcagcaggaaagccagttccagcagaatgcatattaccagaatgcataccagaacaactataatcagaacaattattaccggaacggggcaactgcaggcattatgccacgtaatcttgtacttgcaattgttttttcttttctcacctgcggcatctacagtatctactggatgatcaagctgaatgatgaggtgaatcagctggccggagagccacaggcaacaagcggaggcatggtattcctattttctttgatcacctgtggaatctatggtatttactgggcttataagatgggagaacgctgtgaccgcatcagaggaatacaggggaattcttctattctctacctggttctctcgattttaggattagatattgtatatttctgcttattgcaggatatgattaacaaagaggtatcttaatgcaaagaggatacatagaaattcttgtcacatacaagttttctatgtatcctctttcttctatctttctattgcattagacatggaaacatccaccaccaataaattctctcaaaagtgaattcgttggcacattgtcatttccgattcctacgaaataatccaggaatttcaacaaccgctttgcttcaacatattccggagagtctttacttacaccaagaagcaacggctccacatactgtttcaacactgccagttcatagatcagggaagagttaaacatcacatctgcatattcctgatatgggaaaatattcttttcttctcctcttctcactgacggccacattgagatggtcttcgtcgccgatgcccctcttgttcttgcatctctgacaagtcttcggatcaaacgtccgtctgtagacggaatccggttatgctcatcaatattcagctgtgttaatgcactgatatagatcctgaatttccggtcatcacataactgttctgtcagcttcggattcaggcaatggattccttcgattacaaggatatcattttcaccgagtttctttggctttgtttcaaaactccgtttaccggtcttaaagtcaaaaaccggaagatagacttcctcgcctgccagcagattgctcatgtcctcattgaacttttccacatcgattgcttcaatgcattcgaagttataatttccatcctcgtctttcggtgttttctcccgatctacgaaataattatctacagaaatcggatgtggatgaagcccgttcactctgagctgaatggataagcgatgtgaaaatgttgtcttgccggaagaagaaggtcctgcgatcagaacaaactttacccccggacgatctgcgatctgctttgcgatctctccgatcttgcgctcctggaatgcctcctgcacaagaacaatctcacgcatatcatcctgtgtgatcatgtcattgagcgcaccgacggtatcaatcccctgctggtctccccatctcacagactcactgagtacacgaaacagcttatcctttggcacaaataaagggactttctccggttcgtctttcagcggcatctgaagtacaattccgccctgatacagatacaatgcaaaatacttcaaatctcctgtatccggcatcatataaccataataatagtcacggaattcattcatggcatacagattcacgtgggaacttctccgataccggaacaggcgttctttatcaaacattccatatcgatggaataattccactgcctcttctgtatggatcaactcttttgtgatcggaagtctctgctgtacaagttcatacatgcgttcttcaactttccattggaattccattcccacatgatcgattccttccaccgtacagtaaaatcctgcacctaacgaaaaatgaatccgtacacgcacctgctgcggacgctcatggccaatcacatcgtgtactgccttaataaaaagaaagcagacacttctccgatacgtgtcataccccgccgtatcctgtgttgtaataaattgcagcgtacagtctccggaaacctgtttcctaagttcttgcagacgatgtccatccagtatcacaagtgcgatctgatgtttatactctttctgaaaatccttcgcgatctcctgataagacgtccccttctcataaagatactcttttccgcttatcgtaaccttacatttctgactttccaactctcagccacctccactgtctttgtgaactgctttccgctcacagctgccctgctgaacattattatgcgttcacttctgattatatgatctggaacggatgctcgattggatctgtaagtacatccagcaccggaagcttcttctcaaagaactgcttcatatcttcaataaaaatatattctgttccataatgtcctgcatcaattactgcaagcccctgctctactgcatcaattccatcatgatgaccgatatctcctgtcacaagaacatctgcccccttctcgagagcaactgcaatcgagctctttcctgatcccggagaaattgcaagacgatgcaccttcttctgcatatctccaaatactttcagacttccaagttcaagtctgtgtttcacatagacacagcactcttccaatgtcatatctttctccagattaccgattcttccgattccttccggattcccttcttcatctgtataggtaacatctaacacttccccattctgaaggtccatgatctttccggacagttctgccataccaagcacatcataattcgtatgcattgcataataggaaatgtcattctgaatcagcttcacaattcttcttgtaataaaatcttcatccgtcactttctttactgctgagaataaaagcgggtgatgtgtgatcagcatgtccgcaccttccttgatcgcacggtcgatcacaacatctgttgcatccagtgccagataaattctggacacctctttctctgaacgtcctgcaagcagtcctacattgtcaaatcccaaagctgctgttcgcgggaatgttgcctctattacctgtataatctctttacactgcataatatttcatccctttctctgcttctacaagttcctgttccaattcttcttttctctgacggatccggtcagaatctttcgctttcaatccttctaaaatactttgataaatgcgtatctctctttccagatactctctgagtaccggatgttgtttctccagcaaaagctttccatattttaactgaaccgtatcccagcactttacttctgtatcttcgcctgctgtatcagctaccggtggtctcaccttcatcataggataatattttccatcttcacagaccatatcttcttccagaaattcatatcccttctcaagaagaaatgctcgcactttctcaatctctgactgtggctgaaggatacactcctcaagcttttgcaccacttccgctccttctgtcaggatccggatcacaagtccgccgcccattcctgcgatgaccgcagactggacttctcccggctgtaatgcctgaaacccattggaaagtcttgtctctatctctgcttcaagtccattctcgcggatatgttcctctgctcgctgcagtggtccttcattgacatcaagtgcaactgcttctgtaatcttcttctgctgtgtcagataaatcggaatatatgcatgatccgttccaatgtccgctaatttataatgggcggtcacaagatctgcgaccgcctgtaatcttttcgataattccatcattaatccagataatccctcagttttctgcttctgcttgggtgacggagcttacggagtgctttcgcctcgatctgacggatacgctctcttgttacatcaaactctcgtcctacctcttcaagtgtacgtgctcttccgtcattcattccgaaacgaagacggaggactttctgctctctctctgtcaatgtatccaacacttcatccagctgctctttcagaagtgtctgtgcagctgcctcggccggaaccggtacattatcatcctggataaagtctccaaggtggctgtcttcctcttcaccgatcggtgtctcaagagaaaccggttcctgtgaaatcttcaggatctcacgtacacgttctaccggcatatccatctccttggcaatctcttccggaagcggttctcttcccagttcctgaagaagctgtctggatacacggatcagcttgttgatcgtctcaaccatatgaaccgggatacggattgttcttgcctgatccgcgattgctcttgtgattgcctgacggatccaccatgtagcataagtactgaacttatatcccttgtgataatcaaacttttcaactgctttgatcaggccgaggttaccctcctggatcagatcaaggaacagcatgcctcttccaacatatctctttgcgatgctgactacaagtcttaagttcgcttctgcaagctctttcttggcttcctcatcgccttcttccattctctgtgcaagctcaatctcacgttctgcactcagaagaggtaccttaccgatctcttttaaatacatacggaccggatcttcaatactcacgccttccggaactgacaggtcgatattctccatatccacgtcgtcttcctcagatatgataatgtcatccagatctacatccacctcatccggtgtatctccgctaatgcgcagcacatcaatgttatttgcctcaaggtaatcaaataccttctccatctgatctgcattgagttccatatcattgaaaaaatcattgatctcctggacatccagtatgctctttttctttttaccaagtgcaaccaggtctttcaatctatcaagaaatttctgtgtaatatcgtccatgtgttcttccttccttcgctgcgcgcatccgcagcctgtcttgttttattttatccttattgaattgtaatattcaaattcttcaggttctccagcttccgtttttcttccatcaaatgctgtaacccccgcatatctgtcgggtcgagattcattgtctgatgctcaatgctataactcttcacccgcaggatcgtctcctgtaaagcctgttctctctcttcctttgtcttcagctctttaattcttgtgttaaacaaagaggctgcttctctgtgatcttcttcctctgtgaaatgattcaggatcttcgcaggattcaaggctccctgctttctctgctcatataaaagttctgcaaccgtccgatacagactttctgtaaaatcacccgggcttatgtactgactgatctgatcaaagagcctgtcatcatcgatcatccaggtcaacaatgctttctgtgaagtaaggattccgtcttccttttgcttcttctcagatccttctgcccgtttcggtcttgcgaccggtctcgccattccggcattcacagccatctttgcgaccatcttctccaggctttcccggctgacccggtatgctgttgcaacagcttcgatatagttgttacgctccagctcatcttcgaattcaagcagtctcctcgacacttccctgaagaaatctgtcttgccttccggagaattcatatcatattgtttctccagcatctccaggctgaacatgaatccattacgcgccgcatggatccgcttctcatattcttctgctccaaggttcttaatgaattcatccggatctttatatggatccatccttacaactttagcagaaatcccggcctcccgcaagatcggcactgcgcgaagtgctgctcttgtaccggcttcatcactgtcataagtcagataaacttcctggacataacgcttgatcagagctgcatgccctgctgtcaatgcagtccccaatgaagctaccgcattcgtaaatccggactgatggagagaaatcacatccatatatccttcgcaaagaagaaagtatggctttcttgatgttctggcacggttcagaccataaagattccggctcttatcaaaaacgactgtctccggtgaattcagatatttcggtttcccatctcccatcacacggccaccaaatccgatcacacggttattgacatccataattggaaacatcacacgattccaaaacttgtcgtacacaccctgacgttcatccgtgttgatcagtccggcctgtcgaatcaggtcttcactgtatcccttctctctcagatacttatacagatcatcactgtatttgttcgaaaatcccagtccaaacgctgtgatcgtctcatctgagagttcacggttcttaagataactgtaggcctgacttccacgctctgatttcagctgtacgtagaaatactttgcagccagcttattcatctcaagaatcgtagactttaaatctgctttttccttcgcttctttcgagtattccatctccggaagttcgattcctgctctgtccgcaagaaacttcactgcttctacaaaagaaaaattctcatattccataagaaatgtaaaaacattccctcccgccccacatccaaagcagtaatacatctgcttctgtctgctcacagaaaaagacggtgatttctcattatggaacggacataatccaaaataagagctgcctttcttctgcagccggacatatccggaaatcacatctacaatatcattccttgatcttacttcttcaatcagttcttctgagtagtacatgagtgcctccgcttaatgtttaaagaatactctattatatatattcgacaaaactcttctctttcctttttatttttttattttcttctttttttcttttccaatattattttccaagcagaacggttttatatattaggaaaggactttcctaatatataaaaaaaccaagaatactttgttctgtactcttggtcttatcttactgcggaagatgggacttgaacccacacgatcgcattgatcacaagatccttagtcttgctcgtctgccagttccgacacttccgcattctgaaatattttttgaaatgatgcggaagatgggacttgaacccacacgatcgcattgatcacaagatccttagtcttgctcgtctgccagttccgacacttccgcatttctaaaatatttttttgaaaatgatgcggaagatgggacttgaacccacacgatcgcattgatcacaagatccttagtcttgctcgtctgccagttccgacacttccgcatatcatcattttaccgtggtcatctgcgttaccgccttgccacaacgactataatacacgttgcggcattaaatgtcaacagtttttttaatttttttaaaaatttattttttatatacaattaatacaataagaaaacccggtcttccgaagaaaaccgggcgaaaatacaagctcaaattaagcaagtttctcttttgctactgctgcgagtgctgcgaatccttctctgtcgcttactgcaagctctgcaagcatctttctgttcatgtcaacgttagccagtttaagaccatacatgaatttgctgtaagaaagtccattcattcttgcagctgcgttaatacgagcgatccaaagctgtctcatctgacgcttacgctgttttcttcctgcgtaagaagatgtgagtgctctcattacagactgttttgcgactctgtactgtttggaacgagctcctctgtatcctttagccagtttcagtgttctgttatgtttcttcttagcgttcattccgcctttgattcttgccatttcctaatctcctccttaatctacttccaaatcttacagatatggtaaaaccttcttcatgttctttacatttgttgcatctgtaatagttgcctgtctcagatttctctttctctttgtagacttctttgttaagatatggctcttgtaagctttatttcttttcagctttcctgtacctgttactttgaagcgctttgctgccgctctatttgttttaatttttggcatgataatttcctcctttattgtgctgccttacaggatcttcatcccggatcatattgtcttaacgtttttcagctaaaaccatactcatatttctgccttccagttttgctgccttctctactgtagcaacatcttccagctgctttgcaaaatcatcaaggatatgcttgctctgctgtacgtgagccatctcacgacctctgaaacgcagtgtcaccttaaccttatttcccttggaaatgaacttcttagcattgttcactttggtattcaggtcattcgtatcaatgttcggtgataaacgcacttctttgatttcaacagttttctgttttttcttggcttctttctctttacgagtctgctcgtatttgtacttgccatagtcaatgatcttacataccggtggctttgctcccggtgcaatcttcaccagatcaagctctgcttcctgtgcaagcttcattgcatctctggatgacatgatgcctaactgttccccatccgcgctgatcaatcttacttctttatctctgatctgctcgttaatcattaaatcgctaattgtcgtatacctccgtcaaatgaatttcctttaggttcttacgcgaaaacacaaaaaaacgagtgaatatcatatccacccgacaaatgtaataactccaacaggagctccttattatcgatatcggaccatcagtcactcaattgtgctgcggtgagagtggatactctactttgttttttgcttaacgcaacatctaatttaccatatccactctttcctgtcaacactttaaatgcattttcttttgtttttttatttttttcgaaatttatctttcatttcccatgcagaatacggcaataacacccggtcctgtatgacttccgatcactgttccgatattattgatcagaatattctctattcccatcttctctctgacacgtccggcaacatactctgcatctttcaggcaatctccgtgcgtgatcattatgatctcattctcccagccttttgactgctctactgccatatcaacaattttattcagagacttcttgcgaccacgttctttcgcaatcacctgaagttttccattgttatccatatgtatgatcggtttcacttgcacgagtgtccccaaaactgctgccgctttggaaatacgtccacctctctgcagatgattcagatcatccaccgtaacattatggcaaacgtgaagcttgttctcttctgcccactttgcgatttcatcaatcgtcttgccttcttctttcaacttaagagcatagtacaaaagcaagccctctcccaggcaggcgcaaagtgtatcgatcacgataatctttgcttccggataatcctccgccagttcttccgccgcgattcgcatactattgcatgttccgcttaatccggaagagaatccaagatgaagtacatcttttccttccttcacaaacggttcaagcatctcgcgtgcttcctccggattgatctgagaagtcacagacatatggccttctcttaatttctgaaagaactcttttgctgtcaatcctgacatatctgtgtaagtttctccatcaatcgtatatttcaacggaagaaccggaacatgtctctcttccagccattccttcggtaagtctacagtactgttcacggtaataatgaactctctcatgtcaataacctcctgctctctttcttccggaaaccaccactacattccatatagcagacatgtattttccggataagcaatattttctatatcataccatcttttataataaagagcaaagatatattaacaaaattaagattttgtcagttaatttttacatttagataatttcttcctgaaagtgttttattaaacacgaggaaacataataccaaaatacatcccacaacaaatccatacagattaaacactgcagtcagtacaagaagcatcagtctcataaattttaatgcatatccaagttcgaaattcggctgtgtataatttgccactgccacaaatgccatatatagcattacttctgaattgaaccaaccggattctaccgaaaattctcccatcacaatacctgcgatcacactcagtggagtactgagcatcgttggcgtattcatcgcagccagccgtaaaccatcaattgacagttcaagcagaagaaactgccagatcaatggaagattgatctgatcacgcaccattacaaatgaaaaaacgtccggtagccactgcggattctgcatatataatagatacaatggtgtaaaaaacaccgttgcgattgtgatcagggttctggaaatcttcagatacattccggtcaacgtcggaaaataataatcatttgcctcttctatcatatccagaacagacgttggaagtatcattgccgacggcgagttatccaccagaatcacaacctttccttccaaaagacaggctgctgccgtatccggtctctctgtaaatttaaacttcgggaaaggattgaaccattttctcttgaaaagtgcttctgcaagactctgctgattcattctcaggtcatctacctcaagtttctcaatccttgattttatattgtttaaaagttcttcatctacacggtctgacatataacagactgctatgtccgttctggaactctgacctgcttctgtcatttccataatcagatgtggatctctgatccttctccgcatcagtgccgtattaaatacaattgtctctacaaaaccatctctggaaccacgaagtgatttatctttatccggctcgtctacaccacgggcaggataacttctgcaatccatacatagtgctgcatcataaccatctacaaaaaacaccgctgtaccggagagtacattcctcagaatatcatcaaaacatttcagcacatccacttctacataaggaatcttctgttttgaaaaagtttccgcatcctgtgggagatcttctgctgtaatagaaagaaaagaatccataatctttaacattgcttcatcttttataaatccatcaatgtagtagaataccgattcttttccaccgatctccatctcccggcggataatgtcaaagcttttctccaccggaagggtctgatccatatattgaatattttctttaaaagaacaaccgacttcttttttaatctttttgatcataaaacctaaccctcttttttctgcctcttatttgccttggcttcactgagtttaggtttccctttttcttacaaattattctgtcagccttttatttcttttttgttgtacttccaaatccaccatttcttacttctgtcacgtcatcatctaatgtaattccgtactgtacgaagattccctgcatgaatccatctcctgcttctacttctacggtttttccttcattagaatcatttgtgatctttgcaaagatctgtccttcattgtcggaataataataatcactgtcgataattcctactgtattattcagctgcagtctgtacttgaatcccagtccgcttctcggataacacttcagtacccagtcctgttccatccacacacggactcccgttggaatcttgacggtttctcccggtttcagtgtgatcttcaccggtgcaaaaaagtcatatcctgcacttccggctgtcgctcttcccggcagttttaaagactcgtagattgcttccatctctttttcttccgctgtctcaaatgtgtctttccacccttcaaagaacttttctttactcactttttcaaatcttgcaattcgattcatctctgttaataacctccaatttattttcacttttatctgttttctcgttcttcttgtcccgtatacaggaagtttattctttcctgcctgcaagcactgcaattcattattataaaatacttgaaagtaaaaaacaagttggtgaaataattctcttgagatattctgtgtttagagtataatagattctatagacacgaaacagaaggtgagagtatgcgaacaatggactttactacagaacagccggattgctgctctgtcggtgattatttggagattgtcgaacatgagcttcccacttcctattggtatatgctcgagcatgcctacggtgcaagcacgaatttcaagaaccgggaacgcttgaagacccgcaaaggcaaagtcattaagatctggaaggacgacagattcaactatatcaccctggaatttgatgaagaggatgtgaaatgatgtacaacaaagatgatgttatatatattcttgagaataacacaacaatccgtaaaggaaagattgcacgcaagcagggggataactatatcattcagctgatcggctcctgcggcgcactgacaatgccggaagatcagctatttgaatctgaagaagctgctgaaaagagccgacagcagatcaagctgaacagcgcggatgtacagaatgatttcatatctgtaaaaccggatcctttcgacaactggattgggcgataggaattgagttcaggacactaataaaatgaccgacaggtttttcctgccggccattttttatctctaattatttttctatcctattttgctttaccataaacatattttcctgtctgtccaacgatcatcttaccatcagcattcttataatatggaaatacccagtaaaagttccactccttctttgatgctttcttgtctatataaccggtctttgaagtcattcctatatatccatactttttatttttctgtgcataaatcagatatccgtctgcagctgctgattttcacacacatcctcaagtatctcttcttttgaagcaaacggtttatcagtgtaaactcttctgtcaatcacatcttctacaacatgaacaaccgttgactgatattcaagtgggatgccattgagacgatcatcactgaatatctgaacaagtatcgcatctgaaaacatttgaccgcctccttatgattaaattttcgcataaaaaaagagaagcaagttttcactttcttctcatatttatgtcatatagtggctctattttatttactattttgcgtacacactttcgctgtgtaaatacgtgtaattttataaaattcagtgtgtatgccaaattgcttgaaacccttataaactcagtgttagaacggtgttccatacagatcataaggtgtcacctgatatacgtaataattcaaccagttcgtatacaggttattgcaatgtgctctccaggtcagcattggtttcttctctggatcgtcgtttggataataattctccggaatctgtggattcaatcctttccccatatctctcttatactcggaatccagtgtcattctatcatactccggatgtcccattacaaagatctgacgtccatcctgcgccatgcaaagataaactcctgcttcttccgaatctgcaagaattgtaattctgtcatctttttccaatagatcttgcggaacttctgtatgtctggaatgcggtgccagaaacttatcatcaaatcctctgacgatcggaatctttctgttccttacgtggtgccagaacaaacctgaacgtttttccggaagttgtaccttatcaattccataatgataataaataccagcctgtgctccccaacaaaggtgaagtgtagacacaacatttgtctttgtccactccataatacgtttcagttcttcccaataatctacatcttcaaacggcatctgttctacaggtgcgcccgtgataataaatccgtcaaaccttttatccttgatatcatcaaacgcttcatagaatttataaatgtgacttgttgatgtattctttgacacatgacttgtcactcttacgaaagtaacatccacctgcagcggagagtttgaaagtgctctcagaatctgaagctctgtatcttccttaagtggcatcagattcagaagtccgatactgatcggacggatatcctgatgtgccgcacgcatctcatccatcacgaagatgttctcttgttctaatatttcctttaccggcaaatcattttgtactcgaatcggcattgtccttatctcccttttcttcttgtatttcttttatctcttcctgtttttctttctgtatataaattccttcggaatctacatatccgttcttcccatagcactctgtatctgttggaagttcttttttcttcaggatagaattaaccagcatatttacaatataataaatcaccgcaaatgtcggtacaccaaaaagcattcccggaataccaaataatccccctgcgatcaggattgagaaaacaacccagaacgaggaaagtcctgtcgaatttcctaaaatctttggtcccagcacatttccatcaaactgctgcaatgcaataacaaaaatgataaaatagagtcctttcaatggatctgcaagcagaatcagaattgcactcggaattgctccgatatacggtccaaagaatggaattacatttgtcactcctacgatcacgctgaccagcattgtatatggcatattcagaattgataatcctataaaacagattactccgataatcagagaatcaataatctttccgataataaatccaccgaagatctcattgctttttccgccaatctggagaatcatgttagcctgtcccggacgaaatacagcgtagatcagcttctttgtctgtttctggaacttctctttgctaaacaaaacataaatagagacaatgattccaataataaaattaaagacttcacgaaccatctgaatcattcccacagtaagctgtgtcatccacagattcactttctccatcaaatctgtcttcatccagttctgaacaaaatcacttgcttcttcaactatgctctccaacatctttccaactgttgaatcagaagaatgcaccttactgaattcattgataaaccggttcatctgactcggcacattgaaaatcatgtcgcggatacttccatataattccggaatcatcatattgagaagtgtagtaatcaatgccaacatcaagatgacagatactaagattccaactcctcttgatatctgttttttcttctttaatttgggacaatgtttctccaaaagtggaatcatccgacggtctatccacttcacaatcggattcagcaaatatgcaattgccagtccataaataataggttttgccactgttaaaaactgcttaaatacagatgaaatctgtcccaatctcaaaagtgcaaaataaaataagatacatgtcgcaactacgaagaacaacgtcatactttttatggtctgttctttgaagctataccttcttttttcatgctcttcccacgaattgtgcctataactttgatctgtatgagtctttgacgcctctttcgctgtcgtatgctcatcctgtcgatattcactcatgtacgatcatttcctttcttctgttaaatatacatattacgattataacgcggttgcaataatagagtcaacagtagaaaaaagagattcagaagatcctctcttccaaatctctttctatttatcacgattttatacttttatctgatgctcaattacggcaacaatcaaatgttgcacattctgtcccactgctgtggcaggcgtcaccgccttctacactaattttccctgcgtgacatttgcactcttcattatatctgcaatctttcgcctggcagtcaacgtctgagcaatctgaaacagacttcatcgaatccgtcttattgctataacttccctctcttctttcttcaaagctatcgcaacaggtctcctttgcatccttcgcaccgtttcctcccacctggatcttatccagttcgcaaagatactgataattgtgtacacatgtctgtacggtacagcttaattctggcatactgatttcctcctcttaatcttattagaacaatatcagtatgtccctttcttttaaatatatacacttatatccaaaaacacaaaacggtatgtatctctcaatacataccgccagtaatctgattcttatgcgttctttccacagcagaatttatatttctttccacttccgcacggacatggatcatttcttccgatctttttcgccttgcgaactgtaccagactgtttctgctcacgatacagacgtttctttgtctctgcatcaaagatcttatcccactgtgggagtccatacagccagtcagcttttgcatcgatcatgttcttgtaaagaagttctttatcaaatgcaagacttacaactgtatcttcttccattgtctcgatcgggtttgctgtcttcagactgtcattgattccgtcaaggaatccaaccattgtcatgacatcctgtccatatttctcagcaagctctttcactgttcccttcacttcttcatccgggttctcgagcagctgctcgtaaatctctctttcgattgtaaagtatgttccccagaacttctccagctgatctttcggaagattacggtcataggccatatcacgccactggtctaataaacatttctcactcattgtatattgctcctttatctttaaacttcgaattcaatcgcccttttattatataacaaattttatttgccgtaaacaattatttgatatatactgttactattactatattggcgtatgaaaggactggtcacatgaaaaaactgaaacgtatttctgcactgttaggagtttttattcttatcgcaatgtatttgtgcacactgatttttgcactgattgattcacctgttgcttctgatcttctcaaagcatctatcgctgcaaccattttcgttcctgttattctctatggactgctgctggtcacacgactgttgaaagatgattcaaaagacaattctgatcataaataaaatactgcagtcagtaatgcactgacagaatctactccccgggcgacatgcgaagctgtttcccgggtttttactgcctgtctcctcttcagatattcttccatggataaattttctctgtctttttcattgctgttctgttccatcgaattcctccttcttttttctcagctatatattatgatgttgggggcaaaagcccccaactatgatacctacggattgtttcgtgcaatgcactcccacaatcctacccactattcgcatatcgtgaagcttccgctccacttttatgctcatattgggcgggtcccaaggccattacaccacctttgtgcaagcaccggtggtttcagaccttttgaccctggtatcatcatattatatgaggaactttctgatttattactattttttgttttccgtgcagattccacgcggagcaacaactacattgtacgcctccgtgtatatcctgaatggagcgttttttacatcagaaaagatttttcctgatataacaaagaatgtgccttgcacattctggcgcctgcggcggtcgcttgcgacacctaccttgtacgccgcagtgcgcatccctagcggagcgtttttatatattaggaaagaactttcctaatatataaaaaatacaggacggaaagctttcacttcctgtcctgtatttctgtttcattatttattacgataaataatatcgtttcttcctggtccgttactgatcattgtgatcggatactcgatctctttctcgatgaattcaatgtatttacggcagttttccggaagatcttcgtagtttttgattccacgaatgtcttctttccatcccggaagaactttgtaaaccggttttgccttctcaagaagatgtgttaccgggaattctgtagtaacttctccgttgatctcataaccaacacataccggaatctcatccagatatccaagtacatcgagtactgtaaatgctacatctgttgttccctgcattctgcagccatatttggatgcaacacagtcaaaccatcccattcttcttggacgtcctgttgtagcgccgaactctccgccgtcaccaccacgtcttctaagctcgtctgcttcctctccaaagatctcgcttacgaaagctccggctcctactgcacttgagtacgctttacatactgtaacgatctgcttgatctcgtatggtgggattcctgctccgatcgcaccgtatcctgcaagtgttgaggaagatgtaaccattggataaattccgtgatccggatctttcatggatcctaactgtccttcaagaagaactgtctttccttctttgattgcctcgtgaagataaagagatacattagctacaaacggctctaccattttcttatattccatcagttcgttatataactcatcaggattaatcagtggtttgtggtataaatgctcaagcagtacattcttctgctctgccacgcgcacaaccttctccttcaaaagttcatcatcaaacagctcactaacctgaaaaccgatctttgcatacttatctgaatagaacggagcaattcctgactttgtggaaccgaaagattttcctccgagtctctcttcttcatatgcgtcaaaattcttgtgataagacattaccatctgtgctctgtcggatacaagaatcttcggcatcggaacacctttttctactatagactgtacctctgcgaaaagacgcggcacatccagtgcgacaccattaccaatgatgctggtcgtatgtccatagaacacacctgatggcagtgtatgcagcgcaaattttccgtaatcattcacaattgtatggcctgcattcgcaccaccctgaaaacgaacgatgatatctgcctctctggcgagcatgtctgtgatcttaccctttccttcatcgccccagtttgcaccaactactgcttttaccatttcaaaccctcctgcgtatgtttgcttgtaaataatattaatcagcggtacttataaccattaccgccttaagaattatactatacttttgcagggttgtaaaatgttatttcgcatttttttatttaaatgtcagaaatattgtatttctgcgataaaagtattacaatgaaaagtaaatcaggcggttttcccctgagagcaaactgtttatcagtatgaaatttagtttaatagaagggagactatagaattgaaaaaattaatcaaatggatagttggacttggcactgttggtactgcaatcggacttcttgctgttcgtctgatcaaaaaatcaaagagtacatcctctgatataaaagcagatagcaccgatagcaataaagaagaaacggattccgatacatttgatctggatcaggatcttgaaccaacacaggaaagatcttatgtatctttgcaggcagcccgaccagatgatttaactgaaaaatctgatgttgacagcgctgactcttctgaagcagaaacacaaccagcagtttctgatgaatcagatgatacgattgctgaaaatgaataataaaaaagaaaacggatcgttcaatcttacacttagtaaaattgaacgatccgcttctcttttttattaaaatacagcctgtttttctatcatctattcccatgccttacagagtagttgaactgctgcacggattctctcctcattcatgtttgcataacctaacagaatcaccgcttttcctgtactgtcttcattatcttttacacaatactctgataaaccataaactctgacaccttgtttcgctgctttttcaatcaaatccttttcggaatcatccgtcttaaaatgcagcaacaggtgaacacctgcattttctccggaaatttccagaatctctttcatcttccgaaggctactgatcagaacatcatgcctgttcttatataatgcgcgtgttttattcagatgtcgctcataatagccttcttccataaatttctgaagaatcatctgatccaccttggagacagtagaactgatgaatctgcatttttcctgataaattttcaaaatatgttccggaagcaccatatagctcattcgaatagaaggtgccagtgatttagaaaaggtacctgtataaatcactttcccattgctatcacttccctgcagtgccggaatcggctttcctttatatcgaaattcactgtcgtaatcatcttcaataatatatctgccttccgccccatctgcccatttcaaaagttccattcttctttgtatcggcataacacatccaagtggatactgatgagacggcatgacaaatgcaatatccgcccctgatttctctaattcatcaatccgcatcccgctttgatccatatcaacagtacagactttatagcttaatcgttcaaacaaacgataggcctgtccataggttgggttttccagcgcaactttatgaccatttccaatcactgtcgttaaaagcataagcaaataatcacttcctgctccaataatgatctgatccggatgacaatgtattcctcttgcctgatgcaaataactgctgatcgcattccgaagcccatattccccttgaggattgcccaatcggaacatctctgccttatcatctatcaggcattctttggataattttctccagatattatacggaaaactgttgagatccacaccgttcggagtgaaatcatacgcgtattctgtcactcctgaagaaatcggttcaactttgatctccgtcctcttctgaagctgatatataccttcgatcttcgcgacaaaatatcctttgcatgggattgcctccacatacccttccgacaggagctgttcatatgcaagttctactgtactcctgctcactaccagatgcttactcaatgctcttgtagatggaagccgctctccactctgtattacgttattctgaatctcttccttgataaattcataaatctgttcgtacagcggagtttttgattttggattcaaactcattgtcaattcatacattcttgttctctccctgcatcacacctataactatgaaaaactgccgtgaacaatttctcattgtgatcacggcagtccgttttttatttcttcggcagtttgaaagaactcttcagagaaacaatacggttaaataccagattctccggtgtagaatcctttgcatcgatacagaaaaatccgtttcttacaaactggaagctatcataagctttcgcatctgcaaagcttggctccacataagcatctttgataatcttcagagaatttggattcaggttcagagaaccatcctctttattgtatacacccttctcttcatctacaaggttctcatacagtcttacttctgctttctgtgcatatggtgccggaacccaatgaattgttcctttcaccttacgtcctgtaaatccacttccagcctttgtctcaggatcataagtacagtgaacttctgtcacgttaccattctcatcctttacaaagctttcacacttcacaaaatatgcgtgcatcagacgaacttcattccctgggaacaagcggaaatatttctttggcggttcttccatgaagtcatctctctcgatgtaaagttcacgacagaacggaactttacgttgtccgagttcttcgttctccagattattcgcaacatccagatattcaacttctccttccggatagttatcaatcacaagcttgatcggatcaagcacagccatcatacgggaacgcttcatcttcagatcctcacggatacagtactcaagcatcgcataatcaacagagctctggctcttggaaataccacacatatcaataaacatcttgattgactccggtgtaaatcctcttcttctgagcgctgcgatagaaaccagtcttggatcatcccatccatcaacaatcttatcttctacgagcttcttaatataacgctttcctgttacaacattcgtaagatacagttttgcgaactcaatctgacgcggtgggttctcgaattcacattctctcacaacccagtcataaagcggtctgtgatcttcaaactcaagtgtacagatggaatgtgtgattccctcgattgcatcctcgatcggatgagcgaaatcatacatcggataaatacaccacttatctcctgtattgtgatgtgtcatgcgggcaacacgataaatgatcgggtcacgcatattgatattcggtgatgccatatcaatctttgcacgaagcactttctccccgtctgcatactttccggcacgcatattctcaaaaagctcaaggttctcctctacagaacgatttctatatggactttcttttcctgcttctgtaagtgttcctctatattcacgcatctgttctgctgtaagatcacagacaaatgcttttcctttcttgatcagcttcacagcgcactcatacatctgatcaaaataatcggatgcaaaataaagatgatccttccagtcagcacccagccacttaatatcctctttgatagactcaacaaattctgtcttctcctttgtcgggttcgtatcatcaaatctcatatggaattcaccattatacttctctgccagtccatagttcaaaaggatagacttcgcatgaccaatatgaaggtatccattcggctccggtgggaaacgggtgcatacatgatcgtaaactccttctgccagatccttatctatctcctgttcaataaaattctttgaaactgtttcgttctccatatcttcctcctactaaccataagtaccatccggatgatctgtcacattccttcggaagtgtgatttatcctacaggttttcatgctcaatatcttatcacataaaaagaacaaccacaagagattcttttcgtctccccttacagttgtccttttaaggttactgttcactcccgtgtcaatcactccgctgatggacacggaagatgcatgttttgccctgaatgcagcctgccttttaacaattcataagcctgtgccagaatagctgcatgatccaccgcaattcctccaccttcttttacaacatagtatttttctctgaccaatcctgtccgctcctttttcaggataaccgcatttctcttctgatcctgattttgaattgtcagatgatattccgtcttttcccatccatcttcttcatatgctgtctccggttccatctctatctcaaaccatgctgcatctgccgcatcatctccggcctctacacttacatccgactcctttacgatagaaagatacgcacttgtaataatccttgctctcggatctctctgataatctccataacaggcaaactgttccaccggaagtccgctgactccggtctcttcctgcagttcccgtcttgctgtatcctccagattctcccgcaaatttacaaatcctcccggaagagcccaacagccaatactgggatgatttcctctcttaaccaaaagcacctttaatcgtccttctttcagtgcctgttcatctttataagagaaaacaactgtgtctgttgtacaacacggatttttatatcgatatggatcatattcttccagaaattcttccagtgtctgtcctttcccattccgttctcctgtcccataaaatggtgtgatatcttctaaaaatgatgccatatccatctctccttttcacttctttcaaagcactcccaacatactcatcggttcaaaaaaacgaccgatttctgtcagaagattcgcaaaataaacacaagttcctgcttctgcctccggatgtgatccttgaaaatcataacactgtactcccacaagcggcgcatgtgctttctcccaatcccgttccagaatctcatgaatctgttcttcatcttcttcgccgacccgaagaaaaatctcgatgttctgcctcatcgcatcaaaaaaatgataaaattccggcagatattcttccatctcccatacaaactccgtaaacgtctgtaacacatctttcagttcttttaattcacttgtttcataattcttttcgctcatacggcttccccttatgcagaacccgtcaccttgaaccaccacttcaatcaaatccagtataacatatttcatgacaagtgaaagaattctcaacaaggaattgcattttttcttcaaacccgtaaacctataggaaaatctgcaatgagatttctgttggaatctatgaaaatttgaagatctgcatcgcgaatctgctgaaataagaaaaaccccggaaacaccgcattcacgggcgattccggggaaaagttcaaagctgtctaggggacttgaacccccgacctccgccttaccaaggcgacgcgctaccgactgcgccaagacagcttattgcgttccagcagaacgcaaaattaaatatacactacttgagtttgattgtcaagttaaagctgatctgaatccagcagaatcgtaaatggaccgtcattgagcagctgaaccttcatatcagctccaaactctccggtctgtacttcctccactgactccctgcatttttcaatgatatattcatacatctcattcgccatatccggttttcctgcttcaataaagcttggtctgtttcctctcttacagtttgcatataacgtaaactgtgaaaccagaagaagacctccgtccacatcagcaagcgaaaggtttgtttttccctgttcatcttcaaaaatacggagtccgatcatttttcgtatcattttatctgcaatctcttttgtgtctgtatctgctactccaatcaaaacaagatacccttttccaatctttcctgatatctcaccatcaatcgtaacagatgcctctgttactctttgtattacaaatctcatcttctcaaacctctgtttttttattatttgttgtcagacaaatcaacgtcacagcactcactgtcatcggaatactgatcagaataatcattcccattactattgccggaaggaatctgctctcaagatctacgatcagcgttcccatcagattatagaacatgtgcatcagcatggatgccgccagggtgttatagcgatgcgccacaaatccaagtgcaaaccccaaaagtgccgcataaattccctgtacgagattttgatggaacactccaaacagaaccgcctgtacaacattcgccaggatccaatgcattccggcacgttcaagatatttctggatcaaaccccggaaaatcatttcttccacaagaggtggaagaatcaatgtactgaaaacccacatcagcgaatattctgtcaggccggaattttctatcagattctgataattatccatcgcatccggaagtgaccgtgctacaattgccagtataatactggtcacgtgtatcatgccaaaagtaaacagcgcgattaaaacgcatccgtccaatccgactcttctgcatttgcctgggattgcacggattcctccttcacgcagctgaaaagcaagataataccataaagcaggaataggcagaaccataaggtacaaaattgccgataccagattcaaatgactcatcaggaactcataaaccaccattgttccattgtttcccataaccagaggcccgccaattgcggccagataagaaatgatgtatccgaatttgttaaagcagatcatgatcaccagaaagactgcaagtgccaaaaggtaattgtattttttcttcatccgtatttctcctttacggcagaatcttttgtgcttttgtcttgatcctctgaagtgcattgtccactgacttcggactctttccaagtaattccgcaatcgtccgataatccgttcccatcaagtgcagataaagaacatgattttctaatggactgagcaattctttgagctgctccgcaaaagcttctgtatattcttttccaaaataaagaacttccggatcattctccttcgatgattctatcgtgtcaatcaaaggaagacttctcccctctcctacctcttcactgtcttcatataacgaaacataagaattcaaaggcagatgcttttttcgatttgatgcctcaattgccgagtacatctgtctggagacacaaagttctgcaaaacttgaaaatgatgttttctgcgttacatcaaaatcccgcactgctttgatcagaccgatcattccttcctggatcagatcctcgttctctccacctaacagatacattgcacgcgctttcttccttaccatggatttatatttcaccatcaggtaatccataatctcctgatttccatttttgtaatcacataaaagctgctcatctgtcattctgtcatacttattcatccgattatcacctgttatcactctttttttcgagcaatactcatatttatttctgcgaaatcctctgtcttacgatctcataagcaagaacacctgctgccacagatgcgttcagagaattaatctgacctttcattggaattcctgcaacgaaatcacagttttctttcacaagtcggccaacgccctcaccttcatttccgatcacaagaccgatcggtcctgtcaggttcaggtcatacatctgctcgccatccatatcagcacatacaaaccagagtcctttttccttgagttcttccattgtcttcacaagattcgtcacctttgcgaccggtgtataattcaaagctccggcagatgtcttcgcaactgtcgctgtcagaccaactgctcttctctttggaataatgactccgtgtgcacctgcaaggttcgctgtacgaatgattgcgccaagattatgcggatcttcaatattgtctaaaagaatcagaaacggagcttcgcctctctcttctgccagcttaagcatatcgtcgatcgtagaatattcatatgctgccgcatgcgcgatcacgccctgatgcttccctgtctctgagagctgggaaagtctttcttttgtaacaaaattgatcagagatccgtgttttttcgcttcacgtacaattgttcttaccggtccgtcctggcatccgtcaagaacataaatcttgtcaatcgtacgtccggaacgaaatgcttccagtacggcatttcttccttcaattacaaatgtctctgttccctgttctctattttcctgcatgttctgctcctttttcctttatctctttttcaatgctttcaagtccaatacttacaagctctgtcaatcgttcatactgacctgtcagatataaatgtccgatcaatgcctcaaaacctgtcgctcttctgtaatctgtaattgactgattctttgccggagacacagatcgtgcatttcttcctctccggtaaactccatgttcttcctcattcagatgctcctgcatggaacgcatcataaaggactgtgctgatgcctgcacatactggcttgtctcttcatggagacggtgaaccggcctgtttccacggccgaccaccatcgtcttaatgatcagatcataaacacagtctcccacataagcaagaaccagtggggaacactgctttgcatcaatctctttcataccgggaattgtccggatatactcttctaaacctgctgttatgctcttttccattgtactccttctcttgtatctttcagaacgatacctttcgcaagaagctcatctctgatctcatctgctcttgcaaagtttttctcttttcttgctgcctgacgctcagcgatcaatgcttcaatgtcagaatcaagaatctcatcttctttatcaacaataattccaagtacttctgtcagtcttaccagacggtcaaacagattctcaagatactctttggaactgtcttcgtctgtcatcgtattaatgaattttacaagatcaaatactgcagcgatcgcatctgctgtattgaagtcatcatccatagcactctcaaagtttccaacatattctgctgactttgcaaacttctctgcttctgtctctgccatatcttctgtcttcgcgcttctcataaggaatttcagacgatcagctgctgtaatgattctcacaagtccgctctttgctgcttccatcaattcagcgctgaagttcagtggacttctgtaatgtgcgcttaacatgaagaaacgaagtacctgaaggtcatacttctcactgatctcgcgaactgtgaagaaatttccaagagacttggacatcttacggttatcaatgttcaggaacccgttatgcatccagtatctggagaactcttttccgttcgctgcttcactctgcgcaatttcattttcatgatgtggaaagatcaggtcttccccacctgcatgaatatcgatctgctcaccaagatatttcttggacatctctgagcactcaatgtgccatcccggacgtccctccccccatggggaaacccatgcaggctcgccttcttttttcggtttccagagaacaaaatccagagaatcttctttctcatcctcaccgcttacaagaagggtacgtccgcctgactgaagatcatcaaggttcttatgggataatttaccataatctttgaactttcttgtacggtaatataccgttccgttcttctcgtatgcgtagcctttctcaatcagtgtctcaatcatgctgatcataccgtcaatctcttctgttgcaagcggattctttgttgccggctcaatattcataccgtccatatctttcttgcactctgcaatgtaacgctgtgagatttcttctgctgtaacgccttcttcgtttgctttcttgatgatcttgtcatcgacatccgtaaagttagatacataattcacatcataattcttgtattcaaaatatctgcggacagtatcaaacacgatcattggtcttgcatttccaatatggatgtaattatatacagtcggaccgcatacatacatctttacttttccttcctctagtggaacaaactcttcttttctttttgacattgtattataaatcttcatcgttcttactctccttattttctttctccacacatcgcatatattttatcatagattccaaacgtttgtgaagttttatattctcttcctgcagttctcgaatatctgtaagtaccgggtccggtaaatgtacctgatccatatcacttcttgggactttcctgttgtccatgcggacgattcgtcccggcacaccgacaactgtacagttcggtggaacctcttcaagtactacagaaccagctccgatcttagaattttctccgattgtaaaagaacccaggatctttgcgccggcgctcaccataacattatctttcaacgttggatgacgttttccctgttcttttccggtaccgccaagcgtaaccccctgatacagtgttacattatctccgatgatcgtagtttctccgatgatcacacctgttccatgatcgataaaaagtccctttccaattgttgcacccggatggatctcaatccctgtcttacgcgctgctctctgagaaatccagcgtgcccaaaaataatgctttttcaggtaaagcttatgcgccactctgtagcttaagattactttaaagcttgggtacaaaaatacttccatgtttgatttgatcgcaggatctcgctctcggatcacctctatctcctgtttgacataagatatcattcccatatttatcattcctttctgattcaagaatgcacttaacaccctaaacggattattttgtatatcagaaaaattctctcctgatatggaacaaagaatgtgccttggcacattcttgcgcctgcggcggtcgcttgcgacacctaccttgtacgccgcagtgcgcatcctgagcggagcgttttttatatattaggaaaggaactttcctaatatacaaaaaacttcgtctcaatctagagacgaagttctatccgcggttccactctaataaaagaagtataacttctttcactttcacgcacgtaacgtgtgcctgacgtaccctgctactccattcacaggatcgactcccgggggcacttcacagtttcttctctcaaaggtgctttcagccggtgacaccttctctctatgagtccaaatctctgttactcttcccgttctttgtctttctcaattctattaccaatatttattgttttcaacatctctattatcttatgcaaaaaatcattttttgtcaactattatctctgccgatcaactgtattttaacattttattcagacaatctcattcaaaaatattggacagaagttctgaagtttcctcagttcttcctctagttcttctgtaagaattacgctttcctctgcacttatttcttcaggagttttgtatccaaacaatatttccgtcaatgctgcaatggaaagtactccctgtgaatcttccgtttcagacacgctcaggctttcttctccttttgagctactgagtttccagatcctgctgttcttatgaagaaccggatcgatcaccgcaaaagagcaatggctctcacattctgacgggattttcattttagaaaatagttcctgtaaatgaacgatcctgatcataataagcggtttttctttatatgcagacgtttcatcatctggccagtcaggtgcttccttaagcccataaaccgaaaccttttcttccggttctctaagaccatccaccgacgcccagaagagatcttctttcccttccagataaagtggttccctgatctcgagcccctcttctttcgcatatgcatagatacagaccagcttctcttcttcaaagacaagccgcatcccgccaaactcgctctgttgttcgagaatctgtgtctgataatattgtgcatttcttaaagcaacaacattccagcaatccgaaaaattctcttcaacaaatgccgccatcttccctgcatccataaatcttgcatcacggtctacaatccgctcttgtgatatatttctatattcatcatttttatattcttttcttgcagaaaaaaatgcttcatcaagctcgatttgtttctgttcataaacaaatcggaaatcataaggataatagattgcttctgccgccggcatcaggaaggtaaatggcatcttctgcgaatactgatcctgtaatgcatgaatcagaagatttctcatatatcctctgcctctatattctgcctgcgtggcaactcccacaatataatccgatggaacgacactttcctgtaactttacctgataagggttcagctgcagcatcgcacgtatctcatcgtcttcctctattacataaatcgtattgtcttttgtcttgatataatagtaataatcaacaaattcctgactgtcttctgaaaatacctgttcccacaagctcctggttttcccatgctctgattggtccagctttcgaatcttcatcttattttcccgcacagcatccaccacatcctgcaggcttctccatcacatccacgctactgtaatttgtaaatttttcaatcgcacagatcgcctgggatgagattccttcgccgcttccggtaaagccaagaccctcttctgttgtagcctttacattgatctgatcaacgtcaattttaagcgctttcgccatgttttcccgcatctggtcaatatgcggacgcatctttggacgctgcgcaatgatcgtcgcatcaatattctcgatcacatatccattctcttccaaaagtctgcctacgtgctcaagcagttttatactggatgcacccttatatttcggatctgtatccggaaaatgaaggccaatgtctccaagtgctgctgctccaagcagtgcatccattacggcatgcagcataacgtctgcatctgaatgtcctaagagacctttctcgtaaggaatctcaactccacccaggatcagttttcttccttcaactaacttatgaacatcatatcccatacctacacgcataattatttctcctcaaaatcattttcagcatcttctgaaacaggttcttcattcagttctgcaaaaatatctaccactcttgtgtctgtcagttcttcttcctgagctggagtttcttcaactggtgttccttcagcttttatttcttcgtccggtgtttcctctgattctgttgtaatcaccgttttttcttctgatactgttttttcctcggaatccgccttagacactgcgtcttccagcttcttcctgtcttcttctgaaagcattgtcggcattgtattgtctgatactttttcgtcttctgatgcttctgtcgttgtgctctctgttacctgtgacatttccttcgccgctgccgcttcttctgcttttcgtttctgctccgcttttctctttgctatcatcttcgcaatctgctttttgatatcaatttcaaacgttttgcagatggcattccctgcataagcaactccaaccaggataaatacaactgccagtactgacataagtgtcatattgctaggacgctgctggatcatctcacttaagattctgatacccaggtaggtaagataacctccaagtactattctgagcgcatatccgcttttcttattcatcttgtttcctccgtatttctgttattggccacgttttaaaatataaacgaaagacaacaacttttttctatatcattatctgttatattaccacaagttgctccttaatactattatttctttgcctgatataagcagtaaccagtaaatttgcgcaaaaaaactgcgtactaatttcttaagcacgcagtcttcgttatagtagcgggaactggatttgaaccagcgacaccacgggtatgaaccgtgtgctctagccaactgagctatcccgccatatttaattagtatatgggacctacagggctcgaacctgtgaccctctgcttgtaaggcagatgctctcccagctgagctaagatcccatataagtagcgggaactggatttgaaccagcgacaccacgggtatgaaccgtgtgctctagccaactgagctatcccgccatatttagttagtatatgggacctacagggctcgaacctgtgaccctctgcttgtaaggcagatgctctcccagctgagctaagatcccatataagtagcgggaactggatttgaaccagcgacaccacgggtatgaaccgtgtgctctagccaactgagctatcccgccatatttaattagatatgggacctacagggctcgaacctgtgaccctctgcttgtaaggcagatgctctcccagctgagctaagatcccatattcatatgtcggttgcggtttccacttacgctttgtcgcaaccgacttgattattatatacttaacacctatcagatgtcaacaacttttttattttattttatattttattgtaactgttcagagccaacctccaaaatgctacgcatttcgtcggtgtacagttaccattttatttaaagtattttacacctgattcaaaaatcttcagatcctgctctccataaatgttaatagcaacatgatctccacgtctctcagagtgagccatcttaccaaggacacgtccatccgggcttgtgataccttcgattgcacggtaagatccgttcacgttccactcttcgttcatgctgatatttccttccggatcacagtactgtgttgccacctgtccgttagcgaacagcttatcaagccactcttcgcttgcaacaaatcttccttcaccatgagatgccgggtttgtataaactccgccaagctgtgctccctgaagccatggggatttgtttgtaacaacctttgtataaaccatcttagagatatgacgtccgattgtattgtatgtcagtgtcggagcatcatctgtctgtccaacgatttttccgtatggtacaagtccgagcttgatcagagcctggaatccgttacagataccaagtgcaagtccgtctctctcattcagaagtttttcaacagcttctttgattttcgcattctggaatgcagttgcaaagaatttagctgaaccatccggctcatcaccggcactgaatccacctgggaacatgatcatctgagcctgtccgattgctttctcaaactcgtctactgatccacggatgtcttctgcatcaaggttacggaatacttttgtaataaccttagcacctgctctctcaaatgcacgggcactgtcatactcacagttcgttccagggaataccggaataaatactgttggctgtccgatcttatggctgcaaatatgaatatcggatgtattaaagagcttctcttcaaccttggcatcagaatctgctgctgattttgtagcaaatactttctcaagtgttcctgtccatgcatcctgtgcgtctgcaagtgcgatcttcacatcaccataagcaagtacagactcttctgttacttcaccgatttctgtataagtgattgcgagttctccaacttttccgtcttcaacctctgcgataatatctccaaatgcagaagcaaacagatctctcttatctacattgtgctcgattttggcacccttacggttaccaaatgccatcttgctgactgctgctgcaactccatgacgatccagtgcatatgcagatacaatttttccgctctggatatcttccatgaatttgccgtactgatccattactgcatcgtaaaccggaagatcattctcgtctctttcgatcttgagccatacaagtttgtttcctgctttcttaagttcaggtgtaatgatatcctgctcaagagccatatcgacagcgaaggatacaagtgtcggaggtacatcgatatcctggaatgttcctgacatactgtcttttcctccgatagacggaagtccgaaaccaatctgtgccgcataagctccgagaagtgctgtaaatggctggctccatctcttcggatcctctgtcattctacggaaatactcctggaatgtgaagcggatctttctataatctccacctgctgccacaatcttggcaactgactctgtcactgcataaacagctccgtggtatgggctccagcttgacagatatggatcaaatccgtaactcatcatagatacactgtctgttgttccgttcaaaacaggtactttcgctaccattgcctgtgtctctgtcatctggtattttccaccatgtggcataaatacggaacctgctccgatagaaccgtcaaacatctcaacaagtcctttctgagagcatacattgagatcagagagcatagaaagccatgtctcttttacatctcctacttctttctttacaaaaaggctgtccttcttagaaggaatctcaacctcaacatttgtctcctgatgagcaccgtttgtatcaaggaatgcacgggaaaggttgacaatctcttttcctctccatacaagaacgagtcttggctcctctgttactactgctgcaactgttgcctctaagttttcttccttcgcgtatcccatgaattcatctacatctttcgggtctacaacaactgccattctttcctgagactcagagattgcgatttctgttccgtcaagtcctgcatatttcttcggtactttatcaagttcaacgcgaagtccgtctgcaagttctccaattgctacagatacaccgcctgcaccaaagtcattacatttcttgatcagatggcttacttcttctctgcggaataatctctggatcttacgttctgtcggtgcatttcctttctgaacttctgcaccacaagtctcgatagactcttctgtatgaactttagaagaacctgttgctccaccacagccgtcacggcctgtacgaccaccaagaagaatgatgatatctcccgggtcggaattttcacggataaccgcacgtcttggagctgctccaagtacagcaccgatctccatacgttttgcgacgtaatccggatgataaatctcttttacaagtcctgtagccagaccaatctggttaccatatgagctatatccatgagccgcctcacgaacaagtttcttctgaggaagttttcctttcagagttgcatctgctgatactgtcggatcagcggcacctgtcacacgcattgcctggtatacataagtacgtcctgacagtggatcacggattgctcctccaagacatgttgcagctccaccaaatggctcgatctctgtcggatggttatgtgtctcattcttgaagttgatcagccactcttcttctactccgtcaaccttgatcggaactacgatactacatgcattgatctcatcagactcttcctgatcagcaagctttccttcctttttcaggcggcgcatagccatcagtgcaaggtccatcaggcagacaaatttatcttctcttcctttgaaaatctcgctgtgatctttcaaatattctttatatgttgcttcgattgtctctttgtagtcaccttcatcaaacttcacatcttttaattctgtagagaacgttgtatgacggcagtgatctgaccagtatgtatcaagaacacggatctctgtcatcgtcggatctctgtgctcttctcctgcataatagttctggatatgcaggaaatctttaaatgtcattgccaatccaagagaatcatataactctttcaattctgcttccggcatatctttaaaaccgtcaaaaatctttacatctgccggctcatcaaatactgtcaccagtgtctccggtttctctgctgcagcttctctggaatctaccgggttgatgcagtgattcttaattgcctgcagttcttcgtctgagactccgccttcaattacatatgtgactgctgtacggattacaggagtctcatcttctttaataaaacggatacactgctctgcggaatccgctctctggtcgaactgtcccggaaggaactctacggaaaaacatttatctgtttcatttttcgggaattcttctttataaaggaaatctaccggcggctctgcgaacacaccattgcatgccttttcaaatgtttcttctgaaatattctctgcgtcgtaacgaatcagaactcgtacatttgtcacatcctgaagtccaagataatgacggatctcatgtctgaggcccttcgccgcaacagcaaactccggtttcttttctacatatacgcgctttacattactcatatataatctcctctttctgtattacgtgttcaaaacacgatactaccttcattacattatctgtttttatcctaccatagttttcttcattagtataattaataaaattaaacaatctgataagcactgctaattgattgtcgttttctcgtatctttctcggagtcagcaatatttactctactttttcatattttgtgcaacggatttttttattctgttgtattttccctttatttatcttataataagatgaatatttattaggaggtctaataaaatgatggatataaactacgaattatacaaagtattttatcacgtcgccaccacattgaatttctcagaggcatccaagcagctgtttatttcacagtctgctgtcagccagtcgatcaaaacactcgaacgaaaactggatcagacgctttttatccgaagcacaaagaaagtccagctcacaccggaaggagagattctcctgcgccacattgaaccggccatgaatctgatccagaaaggtgaggctcagcttttagatgccgcttctaccggtgggcagatccgcatcggtgcaagtgacacgatctgcagatatttccttgttccataccttgagaaattccataagactttcccgaatgtacatattaaagttatcaaccagacttctttaagatgtacagagcttttaaagaacggactggtggatttgattgttgtcaattatccgaacgcagcgctcaacaatatttccgcctctatgaagatcaagaatttccatgatgttttcattgccggaaacaattatcctgaattaagggaaaagaaacttacactttccgatctgctccactatccgatcctaatgctggataagaacagtacgacaaacgagtttcttcatcgcctgttccagcagcatcagcttgatctcgttcctgagatcgaacttacaagcaatgatcttctgatcgatcttgcaagaattgggcttggaatcgcattcattccggattattgtctttctgagaacaatgatggtatcttcaagctggatatggaagaagagatgccggagcgttctcttgtgattgcttacaacgagcagctccctctggctaagcctgcacaggaatttttgaactattttaaagaacagtaaaattttgtactgttcggagccaagcagaattttaaaaccagccttaaaatgcaagcattttatacctgttttatgaaatttcatctggctctgaacagttgcaaatattcttgaatcacttcttctttatccaataacgattctcatttttcatttatcgtttctcccagaattcttccatcttttcttttatctctttccgcccacacacttcgtattccttccactccctcggaaatagctgctgatactgccgattctgaaaacggtcatcaagcagaagaataattcctttgtcatcttcggtacggatcactcttcctgcggactgaagtactttattcattccgggataaaggtacgcataatcaaatcctcgcatccctctctggtcaaaataatttttcacgatttctctgtcattgcacacctgtggaattcctgttccaacaacgatcactccgatcaatctgtcatgtgtaagatcgattccttctgaaaatacaccacccatcacacaaaatccaagcatcggatgatctctttcttcttcaaacatttccaagaattcttctctctgattttctgacataaattgcgattgaattaccagttctactccggatgccagtttttcaaactcttccaaaacatcctccataaactgataggaaggaaaaaatgcaatgtagtttccattcttcccatccactgtgcttctcagataatcggcaattttgcgatacatttctgtgcctctttgtgtatattttgtgcttgcttcacttccgatcagaattttcctgttctcctgtgggaacttagattcagcatagactgcataatcatccttctcaacagatagtaattgtttatagtaatcgattggaagcaatgttgccgagaaaaatattgtagaattcccaagttttaaatactgattcagattctccgccggatttacacagaacaactttattttgaatcttccgtttccttccagttctgtatactgtatataattttcatccaacaattcatgaatttccaaaaactgccttaactggaaaaagagttccataaatgcatccggctgctctgcatttcctgcattccgctcttcttcaagatatctttccatttgagtcagaagcttcatcagttttactgcaaatggagaaacactttccaccaaccgataattctcgcattcgcgtttcatctcaagcatcagtttattgacagattccagactcttcacaagttttttatctcggtccttcatcagttttttcacctcgagaatgtcttctttatagatggaagcactgtacatttcccgtccacgttccacgagattgtgtgcttcatcgatcagaaacaaataatctccgccgacattgtctgcaaaaaatcgtttcaaatgtgccgttggatcgaacacataattataatcacagatcaccccatccgcccattctgacagatcaagagatagttcaaacggacatacatgaaaatcttctgcctgtctttcaattgattcccgtgtcagcttcttttgcttttccaacatgtcataaactgcatcattcacccggtcaaaatgacctttcgcataaggacaagcatccggattgcattctgtctcctcacaaaagcagatcttctctttcgcagtcaatgtaattgaacgaaaggcaagacccttttcttcaagaatagaaaatgcctgctccgccacggttcttgtgatcgtctttgctgtcagatagaataatttatcccctaatccttctccgattgctttcaccgccggatacaatactgccatcgtctttccggttcctgttgaggcctggataaataatttctttttgtgataaattgtacgatatacggaagctgccaggtcaaactgcccttctctatatgcgaatggaaattgggtctgatgaatcgaagcatctcttctcttttcccactcaatctgcagttttgcccaacgttcatactgatgaaccagatcaagaaaccatttttctaattcttcaaatctatactcttcccgaaatcttttcacatcttcagtatcaagattacaataggtcatctgaacactgatctgctttaatccctgctgtctggcataaatatatgcgtaacattttgcctgagcaagatgaaccggcacaggacgctccactcgatcaagggaacgcacgacgcctttgatctcatctattattgttttttctgattcaaggagaattccatccgcacgtccttccagttttaattggaatccgtcacacggaagttgcagttttaaggaaacttctgcctgatagtttgagcccatcatacgctggatctttcggtgaaggcgtcctcccatcagcatcgcatctttatccagcgtacctgaaattctgttatcaatgtcaccttcttttaatatgaattcaaccagattccgaaccgataacctgatgattttctctgtttccatttcatttgcactccaaaatattatcgttgtaaaacacattgtgccaatcttttaacagattggcacgctgaaatacatcttttattttactttacttctttttcttttgcaacgcttgtttctgtacgggcaacttctgcgattgttttcgtaagtcctgcaattccctgaatctctgaaggaatgatgatcttcgtcgcttttccgtctgccgccttggcaaatgcctccagactctttaatgtaagaacaacatcatctgctccggcattcttaatatactcgataccttctgctgtagccttctgtacagaacggatcgcttctgcctgtccctctgcttctttgatccgtttctgtttttcagcttctgctttcaggattgctgcctgcttagatgcctctgcctctaggatcacagattccttttctccttctgcaacaagaatcgtagacttcttctctccttctgcacgcaggattgcttcacggcgttcacgctctgctttcatctgtttctccatcgcatcctggattgccttcggtggcatgatattcttcagttcaacacgattcaccttgattccccactcatctgttgcaatatcaaggatcgtacgcatcttggagttgatcgtctcacgggaagtcagtgtctcatctaattccagatctccgatgatattacggagtgttgttgctgtcagattctcgattgccgcaatcggactttctactccgtatgcatacttcttcgggtcagtgatctgatagaatacaaccgtatcgatctgcatggtaacattatccttcgtgatcactgcctgtggttcaaaatcaacaacctgttctttcaaggaaactctttttgccacacggtcaaggatcggcaccttaaaatgtaatcctacgccccatgtctccttgtatccgccaagtcgctctacaacatacgcatgcgcctgcggaacaatacggatattcgacacaagaagccacaccacgatcataataatgatcatccaaataataagtccaaatatcatagctcatcctcctcacatttctctaaaatcagttttactccggaaattgctgttactttggcaagcgaatctttctcaattctgtccttgtctgacttgcaccttgcagtccattcctttccctgcgcaattgcagtaccggtctgtgcaaaattatcaaccgtctctgttaccttaacaacacttccgatcaattcatcacaatttgtcttcacatgatgcacattaacatacttcgctgcaaaaggcctggtaaagatcacaagcactgctgaaataactacgaatacagcaatctgtatcaccattcccgctccggcaagcgaaactaataacgccgccagcgcaccgcccgaaaaccagattgaagtcagaccaaccgtggcaagctcaataatcaaaaacactaccataagccccagccacaaaaaaatctccctctccaaaaaatccgccccctttcatttttgaatacactgattatcctagtcgataagtatccgttttctttcctactttcaattctgtatttctgagtggattcctcctcttgaaatgagtccccctctttgaaagtgtaagcgagaacagttctgctgttgccatgggcacatgtaaggcaggagcgttccgaatacactttgttcagtatgttagtaagagccagacaggcaccacacacggtaactgttctggctcttacgttacatactttcaaagggatgaggtagagcgagccggtgctcgtggtaatagcaggactggtcttgcgaccattctataaagtgctcattccccatacgaatcccctcaaaaacacaaattactcacactcgcgaatcttctttctcagcggcagtaccatcgccggagatacagacagttcgtccagtcccatcttcaggaactcttctgtcagttcaagatccgctccaagttctccacagattccgatccattttccttctgcgtgtgcattatctgctgccatcttgatcatagcaagcactgccgggtgatgtggatcatagaactcatcaagcgcaaggttctgacggtcaattgccagtgtatactgtgtcaggtcatttgttccaacactgaagaaatcaacttctttcgcaagttcgcggctcatcataactgatgccggtgtctcgatcataataccaagttctacgtcttccttaaatggaagtccttcttctctcaactctgccttcacttcttcgatgatctctttgatcttacgaacttcttttacagaaatgatcatcgggaacataatggaaaggtttccatatacggatgcacgataaagtgcacgaagctgagtcttgaagatctccggtcttgtcaggcagatacggattgctctgtatccaagtgccgggttctcttcttttgcaagattgaaataatcaacctgcttgtctgctccgatatcaagtgtacgaatgatgactttctttcctgccatgctttctacaacctgtctgtaagctgcaaactgctgttcttctgtcggataagtactgttctcaagataaaggaactcacttctaaacagacctactccgcctgcatcattcttaagtactgcaccaagatcagatacgttaccaatgttcgcatagacattgatcttctgtccgctctttgtcacattctcttttcctttaagctgattcagaagttctttctgctcaaggtctttcgcacgcttctcctgcatctttgcaagtgtctcttcatctggatccacatagagtgttcctgtaaatccatcaatgatagccatctctccgtcatatttcggattaagagcttcgcccattccgattacagccggaatattcattgttcttgcaaggatcgctgtatgagagttagaagaaccatacattgtagcaaatccaagtaccttctctttgtcaagctgtactgtctcacttggtgcgagatcatctgcagcaacaatacaaggttctgtcatctcacgtgttccgttgctcactccgcagagaatatcaagcacacgctcggaaacgtccttcacatctgctgcacgtccctgcatatatgcatcatccatagatgcaaacatctgtgcaaagttatcagctgttgttgaaacagcatactctgcatttacactttgtgtacggataattccttcaatagattccagataatccagatcatcaagcatcatctggtgaatctcaaagatcatggcgttggcctcacctacatcttcaatggctttgtcgtagagaactttcagctggtcgattgctgtattcttagcctcttcgaatctcttccattctgcatccacatcatctacatgtgttcttctgatcaccttttcgtttctcttatagaacatcagctttccaatggatactccaccaaatacgctttttccttcaatcgttatcatatacacaaatcctccttgaaataaaatatttcatagacattggttaaattatataatacttcaattcttttttcaatcgacatcctttatttttccaatccattcgtaaaataatctttcctcgcacttctattttttaccaatcttataaatccgatatgctaaatggtatttacaaattgttgaaatcgattttacgtcatttcacatgtttttgtcatttttctacaaatcaaaaaagattacatttgactttctttgttaaacatgctacaatagacaaagtgtcaatatgaatttatactgacacaatattacagttttcagcgcattgtaaactgtgatgatttaacaacttatattcttttaatggagggcaacacaatgacaggtacagtaaaatggtttaataaccagaagggttacggatttatctctgacgctgaaggcaatgacatttttgttcattattcaggacttgtaatggatggattcaaatctctcgaagagggccaggctgttgagttcgaagtaacagaaggcgctaaaggacctcaggctgttaacgtagtgaaactttaatcaagactttatgtaccttttaattaataaatagaccgtatttaatttttaaaagtaatacagaaattcgattaacaaaaaagagcttttttaagctctttttttgttgcacaccccggcaatctacattacgcttacacgcgaaatgcagttttgccggatataattattttattaacaaagtggatattttgcagtcagctcagcaaccattgcttttgctttctctacattttcttcactttcgattaccattgcaataatctctgcgatcttatccatatcatcttccttcattccacgtgttgtaaccgctggtgttccaagtcttacaccacttgttacaaacggtgaacgaggatcattcggaattgtattcttgttcgctgttacatgagcatcatcaagacgcttctccagctcttttccgcttgtctctgttcctgacaggtctacaagcatcagatggttatctgtatctcccgaaacaatcttaactccgcgtgctttcaaaccgttacagagtgctttcgcatttttaacaacctgctccatatatgttttatactcaggctcaagtgcttccttgaagcaaactgccttaccggcgatcacatgcatcaacggacctccctgaattcccgggaatacagctttgttgaaattgaattttttattcatctcttcgctgcacatgatcattccacctcttggtccacggagtgtcttatgtgttgttgttgttgtcacatgcgcatacggaatcggacttggatgaagtcctgtagcaacaagtcctgcgatgtgtgcgatatctaccatcagatatgctcccacctcatctgcgatctcacggaaacgcttgaaatcaatcgttcttgcataagcacttgctcctgcaacaatcagtttcggtttatgttccttcgcaatacgaagcacttcatcataatcgatcacgccgtctgcattcactccgtaatgtgctacatcaaaatatttaccggacatattaaccggtgaaccgtgtgtcagatgtccgccatgatcaaggttcatccccatgatcttatctcccggctcaagcatggcaaacataactgccatgttcgcctgtgctcctgaatgtggctgcacattaacatactcacatccaaacagtttctttgctctttctcttgcaaggtcttctactacatctacacactgacatccaccataatatctctttcccggatatccttctgcatacttattagtcagagggcttcccatagctgccatgactgctttgctcacccagttctcagaggcgatcagctcgatatgggagttctgtctctccatctctgcttttattgcatctgctatctctgggtctgtgttcataatctcatcgaaatcgtacattatctcttcctccattaaagctttaccacgtcaaagcgttgtagtcattatagcacagcactttacatccgtctagcgcatttcctacgaaaaatcaaacaaggaaagctgattactctgtggaagattcccaaataatcccagttctgccatcagatcgatcactgtcttacttacttttgtcctctgacggaaatcatccagtgagagatatggaccgtcttttgaagcttcttccacagcttccgccgccttatctcccattccttcgatgctggcaagagacggcatcagttttccgtcaatgatctgaaacatcttcgccttcgcccggtaaatatcaatcggcataaactccagtcctcgtgcgtacatttcctggacaatcttcatatctttcatgacatcctgttcttttttcgtcagggtatcacttcgttttttataatctttcatgtagtaattcagtttatccttgccctgacacatgatcgcataagaaaatgcatccgcacggattccaaaatatgctccataataagcaagcggataattgatcttacaataagcgatacgataagccatcataacataggctgccgcatgagcctttgggaacatgtagctgatcttcttacaggaccatatataccagtccggtacatcctgagctttcatcgcttcttcccactccggtttcaatccttttcctttacgcacactctccataattgtaaaggccagtgcactttccactcctttgttgatcagatagatcatgatatcgtcacgggtacagattgccgtagaaatggttgcttttccggattttacaagttcctgtgcatttccgagccacacgttcgttccatgtgacagaccggaaattcggatcaaatctgataacgtctgaggttttgtatcctgcaccatctgaataacgaaatccgtaccgaactccgggattccaagacatccaagcttacagccgtcgatgtcttccggtttgattccgagaatttctgtgccatggaatagttcgattactttcttgtcatccagcggaatatccgttgcaacgaaaggatgctcctcattatattcattttccattgcatcggaggtgatatagtcttccaatgtacgaatcatcgtaggatcatcatgtccgagaatatcaagtttcaaaaggttatggtcaatggaatggtaatcaaaatgtgtcgttgtaatgccacattccatatcgttggccggatgctgcaccggtgtaaactcattgatgctgtgtccgtgcggaagtactacgattcctcccggatgctgtccggtacttcgccggattccggtacatccttctgtaattcgttcaatctcacagccacgctttctctgaccacgttcttcataatagtttttcacaaatccatatgctgtcttatctgccagcgtaccgatcgttccggctttgaatgtatgaccctcaccaaagagaacctctgtatatttatgagccttcgcctggtaatctccggagaagttcaggtcaatatccggctctttatctcccttgaaaccaaggaatgtttcaaacggaatatcaaacccggccttgaccagtttttctccgcacacaggacaatttctatccggcatgtcgtaaccacagcctccggcaaatgcccgaacctcttcagactcaaaatcactgtaatggcatttttcacagtaatagtgagggcttagcggattaacctccgtgattccggacattgtcgcaacaaaagacgaacctactgatccacgggaaccaacaagatacccatccgcattggacttccataccagtttctgcgcaatgatatacataacggcatagccgttggaaataatagagttcagctctttctcaagtctggaagacacctgtaccggaagatcttctccatacatttcatgtgctttacgataacagatatctcgaagctcctgatcggaatccgcgattaccggaggacacttatttgggtttaccggtgagattttctctaccatacgtgcgatcttctgtggattttctataacaacttctcttgccttcgcagaaccaagatatgcgaactcttccaacatttcatctgttgtgcgaaggaacagcggtgcctgattatctgcgtctttgaatccttttcctgccatgatgatccggcgataaacttcatcctccggatcaaggaaatgaacgtcacaggttgctacaaccggcttaccgaatttctctccaagttcaacaatctcccggtttacgttacgcagatcttcctctgtattgatattcggcgttttctcatcttcgagcataaacatatcatttccaattggctggatttcataataatcatagaaatctgccagtctcgcaatctgctgtgcagactgtttttcaagaaccgcacggtataattctcctgcctcacaggcacttccaatgatgattccttctctgtgttcattgatcagacttttcggaattctcggtcttcttgcataatatgtcatatgagatgccgtgatcagctgatacagattatatcttccaatatcattctgtgcgatcaaaataatgtgatgtgtcggcatcttacggattgcattaacattacgatccccaaacttgttcatttcttttaagttcatgatgtgctgatctttgagcatttcaacaaattttacaaaaatttctgctgttgcccctgcatcatcaaccgcacgatgatgattttctaatgaaattccaagtgcttttgcaaccagattcaatttatatttcgaaagggtcggaagcagcacacgtgcaagagccactgtatcaacagctgtgaattcctgttccagaccaagcacacgacaattctgttcgataaacccaacatcaaatcctgcattatgcgcaaccaatgcgccctcaccaataaattcgagaaactgtggcagcacaacctcgattgtcggagcatccagcaccatctcatctgtaatacttgtcaggtttgtgatttcgaaaggaatcgggcgttccggatttacaaaggtactgaacttgtctacaatctgcccattctcaaccttcacagctccaatctcaataattctgtcacggatagaactgaatcctgttgtctcgatatcaaaaacaatataggtatcatccaatgtctgatcttttgcattaactgcaatctcagttaagtcatcgaccacataaccttccacaccatatagaactttaaacggatcatctttatccaatgtctcaatataatgatttgcaaccgggaacgcctgggctacaccatgatctgtaattgcaatcgccgggtgtccccagtcatgtgctctgcggacgatatctgtcacttcagaaactccatccatatcgctcatctttgtatggcaatgaagttctacacgtttcgttggattgagatcttgccttgagaccgtaaagtctccaatcttcttgattccggtaattgaaccgattgtcagttcaccatcgaatttatcaattgtcgtcacgcctttgattttaacgaaagcacctttcttcaaatctccgagaatctccggtaactgatcatttctggcaaacatcttgatcgtgattgtatccgtaaaatcagtcacagcaaagataatgatcgtcttctcatttctgatctcccgtgtatcaaaattgatgatcttaccatgaattgtgatctcacccatctcagaaacaacctgttccaatttgattggctcatcttcaaaattctttccgtagatcaggttcggatcatctccgatcttcaccggacgcacataatccttcttgcggaattccttctttttgaactctttctttccgcccgaaacggatgcatttcctgaagaagattttcctgaagtctctgctttcttttctccggaagacgagcttcctgattcggatgacttcttctttgcctccacagcagactttcgctcctcatattcgcctctctgtttcgcgcgccgttcaaagattgcattaatttcctgctgaatcctctgctcgtcatattctctgcttccctgaccctcgttttctttatatgtaacccggatatcaacattcatatgaaaacgattcctgaatacatcgtccagcagattcatgatttcttcttttcttccttcggaaacaatcgtatcaagaagctccagacggacgacatttccctcttcatagttcacttctgcctgtgaaaacatgtttgcagcaaggacactgatttctttcagttcaagaatcaaactctccttgtactcttccatcaccgcttccggtgtataaagctcagacagctcatactcttccagaatctgaagttttacagaagatgttccaaagagctgctctttgatccgctgctccatctgccatattttcttctttgggatcagatgatgactctttaaatgtacatgcagaaaatcacgaccggaattagtcgtgattttcttaacttccacatcagcaaagaggactttaaattcctcttctactttcaatgtgggaaatacatgaaaaaatgttttttcattctttatttgttccaattcaataactcctgtcttaaagtatcaagaagttcttcttcctttaccttcttgatgatctcacccttcttgatcaaaagtccttccccgatacctcctgcaattccgatatcggcttcttttgcctctccaggtccgtttacaacacatcccataactgcaactttaatatcaagcggaatgtctgctaccatctcttctacctggtttgcaagcttgatcagatcaattcttgttcttccacaagtcggacaggatacaacttcaatacctcccttgcgaagtccaagtgtcttaagaatcagttttgctgtacgaatctcttctaccggatctcctgtcagggaaacacgaattgtattaccgattccctcatggagaatgattccaagtcctacagaagatttcacatttcctgaatatacagttccagactctgtaattccaacatgaagcggatatgggcattccttagcgatcagctcatgcgccttcacacacatcagaacatcagaagatttaatgctgacaacaaggttgtcatagcccatagactcgatcagatgaactttatccagcgcactctccacgatcccttctgcagtaacaccaccatatttctcaagcagatgtttctcaagagaaccactgtttacgccgacacggattggaacattgtactctttcgctttgtctactactgcctgtacccgttcttttgcaccgatattccccggattgatacgaatcttatcagctccattctcaattgctgcgattgccatcttataatcaaaatgaatgtctgcaacaagcggaatatgaatctgttttttaatctctttgattgcttttgcagcctccattgtcggaactgtacagcggataatctcacatcctgctttttccagacgcaggatctgctccactgtggcttctacatcttctgtccttgtatttgtcatagactggattgctatcggatggtctcccccaatcacaacatccccaattcttacttctttcgtctgatttctgtacatgatctgtaccccctgtttccactgctctgcaagttctttctgtgtcatctgctgaggcagaatcaccgtttactttccacttttttcaaatgtcttctgacttccatattctgaatcagtcagtgtcagtacgttctgttccacgctgtattcgtaagttccttccatcacatccgcaatatcctgaagctcctgtttggaacagtcctttgttttttcagcctgttttgctatcttttcttcgttcacatgaattgcaaaacgcttatgttccatatcaattgtataatcaacaggaacgctgactgtactctcgtccaaagcctgcacaatatccattgttccgttattcttgatcgtcagcttcattccatcatctgtgttctcccaatttcctgtcagaggattggaagtaaaaagcttcacagcgaaaaaaacaacgatcagaatgatcagaactgaagtaaccgtcataactgttctccaggctatatttctcttttcttcattatctttcagtaacataagaatcacttcctttgcatatttatcttatccaaaaataccgccaataattccataggaaatgactgacataataaatgctgcgaggcagacaccaacaacaactgccggaaaagcttttctaaagcggattccaagcagagctgcgatcagtgatcctgtccacgctcctgttccaggaagaggaattccaacaaaaagtacaagaccccagaattcatatttctctatcttgtcacttttactcattgccttcttctccagcttctccaccatcggcttcaaacgcttcgttcctttcatccagtcaaagatctttgtgatcagtaaaaggatgaatggaattggaacaagatttccaatcacacagataggtactgcttttgcaagttccacattcaaaaatgccggtcctgctgcaagcagtcctccacgcaattccagaatcggaaccattgagatcaggaaaagaataaattccttaccgacctttccgcccagtgtcaccataaaccagttgatcaaagcttcactcattcagttatttctcctttatatatgttctcaaaaaatcaaaaagcgtcgccatctcttctcttgtaccaattgtaattctcagatactgatcgattcgtggtgcattccaatgtctgacaaagatattattctctttcaaaacctggaaaagttcattcgcatcaacctctggatgtcttgcgaaaataaaattcgcctttgcatccgggaaaacaaaaccaagtttcctgagctcttcttttgcccattctcttgtttcaactattttacgaactccttcttcaaaatatgccttgtcttcaaccgcttccacaccacaggcaagagctgtctgattcatcgtgtaagagttaaaagaatatttcacatcattcaggcagcggatcagatctggattcgagattgcatatccgattcgcataccagccatacttcttgcctttgagaaagtctgtgtcacaataagattatcatatttatcgatcagttccatcgcagatcttcccgcaaaatcaatatacgcctcatctacgatcacgatagaattcctattctgctttaagatatcttctacaaattcaagatcttcataaattgctgtcggcgcatttggattcgggaaaataattccgccgttttcagcataataatcctctttcacaatcttaaagttttcatcaagttctggacagtgataaggaatccgatataattctgcccagactttataaaacgaatatgtaatatccgggaagagaattgggagatctgaattaaaaaatgtaaggaaacacatcgaaatcacatcatcagatccaacccctacaaaaacctgatcttttcctacaccataataatctgcgagacttccaacgagttcgtccgcagttggatccggatacaggcgaaaacggtctgtgtccatctctttcagaacacgttccactcccggtgccggtggatatggattctcatttgtattcagtttcacaaccttatgctgtggctgctcgcccggtacatatggttctacgctacgtatatttctcaaaagttcttctcttacagccatggtactacctctatctatactctctcgcaagctccgcaaattttggaagtgcatttacaattgtttcatatgctacacaatacgccattctgacatatccgggacatccaaaagagcttcccggaacgatcagaatattgtatttcttcgcggtattacaaaattctttttcatctgcaaccggtgattttacaaagagataaaatgctccttccggtttgatgcactcaaatccaagttctttcaatccattataaagagtctctctgtttctgtcataatatgaaatatctgtcttctcattcagacatgccttcaccactttctgctgcagtgtcggtgcattgacaaatccaagaattctcgttgcaacgttagctgcggcgttcagtttctcactgtctgccacttcatccggaattacaagataaccgatacgttctcccggaagagaaagtgatttactgaaagaatatcctacaactgtatttgcataatactttgtgagatatggaacttccactccgtcataagcaagttctctgtatggttcatctgaaatcagataaatctctgttccaaattctttctgtttcttctcaagaatcgttgccagcttctggatcgtctcttcggaataaacaacacctgtcggattattcggcgtattaacgatgactgcctttgtctttggcgacagctttttctcaaactcatcaagctttggctggaatgtctctgtatccggagatatctccacgatcacaccgtcataattatccgcatagcttctgtattctccaaaataaggagcaaacacaacaacttcatcacctggattcagcagtgatttcaaaatcacattaagacctcctgctgctccgactgtcatcgtaatattgcgggaagcaaagtttgttccaaagcgttcatttaaagaatcagcaactgcctgtctcacatcctcataacctgcattgctgttcgtataaccgtgaagcacgatcggatcctcttcggaaaggatctcgatcattgctttctttaccgcttccggtgccggaacattcggatttcccaaactgaagtcaaatacattctctgctccgtattttgctgcaagacggttgccctcttcaaacattgcacggattgcagaactgttcgctaccatgttttccattttttttgaaatcattgctgtcctcctattcttgtcacaaaccctttctcttccaaaaaagccgggcgataagataattttgccttacgaagtccttcttccccggcatcatcttctctgttcacataagtgtaatccatacattcatgttcaacaaactgctgattaatcatagggtatgctccctgtacatctgcaaatgctttctcaatatgaacaacaaatgtatccttgcacagttcttcccctactgtaaaagcaacaattttttcgccatttctcaacactccgcctttaaagccgagttctttgtataaacggagggaattcaacgaaacgcacatctctgcgttcttctcaggatcatcattacatccattcgaatttctccacttcagagccatctgaaagcacgcttctacattctcatcactgagtgattcgtaagaccagtccggataaagctgcttaaacttattaatatggtttcgctttccgtgaagtttctttcctgcaagtgttgcaagcttctccgtctcatagatgtaatctgcctgatctctgtcatattcaatctggaattgtcccggataccactcttccatctgtgaaaaattctccggtgtcacacagtaaagaccgaattcacagtcttcatcctcgcagatcttcatcaattcttccaatgcagctttgacggcttccggctttcctacagggtaagcataagtatgtccatctccttcatcacgaaatacaagtgcattatgaaggattgcatatttcactttatactgtctggaccagagatatacattcgcaaatgttctctcgcagcttctgcttggagcctgtgcaaaataatagtcaatcagttctttgtcttccagttccggtcgtttgaattccggtatcatctttgtactactcctccatctttgcaagcttcgctgtctgatccgctgcaatcaggctgtcgatcacttcatctagatcaccattcagaatgctatccagtttatgaagtgtcagcttgattctatgatctgttactcttccctgtggaaaattataagttctgatcttctcagaacgatctcctgtaccaatctgacttcttctctctgctgcctcagaagcctgtttcttctcaagctccaggtcatacagtttggaacgaagcagtcggaatgccttctctttattctgcagctgtgatttctctgtctggctgtagatcacgattccggtcgggtaatgagtcagtcgtaccgcagagtccgttgtattgacacactgtccaccatttcctgatgcacgcattacatcgatacggatatccttctcatcgattacaacatcaacttcttctgcctcaggcattacggctacagtaattgttgaagtatgaattcttccgccactttctgtctccggcacacgctgtacacgatgtactccactttcgtacttcatacgggaatatgctccctgtcctgtgatcatgaatacacactctttaaatccgccgattccattctcattcagagagatcatctctgtcttccatctacggctgtctgcataatgcacatacatacgataaacttctgccgcaaaaagtgcagcctcatctccacctgcaccggcacggatctcaacgataacgttcttatcatcattcggatccttcggaagaagaagaatcttaagttcctgctccaattcttcaattctggctttagattcattcaactcttcttttgcaagttcacgcatctcttcatctgattcttcttccagaatcatcagactctcttctacattctgcttacagttcttatattcctgataagcttcaacgattggtgcaagatcactctgctctttcatcagcttacggaaacgttccggatcatttgccacatccggctcctgaagttcacccattacttcctggtaacgaattaccaaatcctctaatctgtcaaacatagttctatatcctcttctattttttatcttctttatctttttaatagtacacgccacagacgatgcggtcaagtcctgccaggtccttttttacgaacaccttgtcatatcctgcttttttcataagatcagaaacttctttgccctggtcatatccaatctcgaaagcaagtatccctcctgttttcaggaattgttttgcatcagtaacaatcttccggtagaaatacaatccgtcttctttcccatccaatgcactgaatggatcgtgaagtttcacttcgtcttgaagcttctcaatttctgctgttctgatataaggtgggtttgataagatcatatcataggtttcattgacattttcaaaaagatcactcaaaatccagttcacttttccattctcatcctttttcgtgcttctcaaatgtttttcatttttctgcgctaccataagagcctgctccgaaaagtcaacacctgttccttctataaatatacccttttgttctgcataatgcattacgctcagaagaatacatcctgacccagtacacatatccaacagttgcaaacaaccttttgatctgaatatctcttgtttcattatctccagtgcctcttccacaagcacttctgtatcttgtcttggaatcagcacatgttcattcaccagaaattcaagccccataaattcctgacttcctgtaatatgctgcaatggaatatgatttcttcttttttcaagatattctttatacttttcccatgcttccggatccatgctctgatccggatccatataatagcgagctttcgtaatccctgtcacaaattccaacagataccacgcatccagatctgcctctgtaattcctgctttcgcaagaatttcttttccttctttatatgcatttttcaaacttattgaatcgctgcaatctgttttatacactgtcctcttgtctgattctgttctcattgcttcaggttctcctcctgccatgtcttccagtcaaacactgcttccactgctttgatcccaacctcgatcatactgtcatccggttcctttgttgtcagattctgaacccagagtcccggtttactaagtacattgattaccggatgatcgctgtttcctgccagacgaatcaattcataagagattcctgcaatcaacggaagcagggcgatccgaagaagtactctcacaatctgggactttgccgtaataaaaaagcagacaataatgcttacgatcatgacaaagaaaagaaagctcgttccacatctcttatgttgtttggaactcttccgtacattttctacatttaattccaatccatgttcgatgcaattaatacatttatgctctgccccgtgatacataaatgttctcttaatatcctttgttctggaaatcagaacaatatagatcaggaaaatagcaacgcggatcacaccttctaaaacagtcatcacaagatgtgaagaggtatgcttttctataatactactcagataatacggaagaaccataaaaataccaaccgcaattaagacagaaaccacaactgtcagattcatgatcagtttttccttcttctcctgctttcttgcctcatcttctgtaagaatttcttcttcctcgtcttcaaaaaaacttgcagaataagtcaatgtcttcattcccagcacaagagaatccacaaaattaaaaatcccccgaatgaaaggaatcttttgcggtgccttccatgggagaactcctttgtattcctgaatatcaacttcaatctctccatctggtttccggacggcaacggaatatgtttcccgattcttcatcataatgccttccagcactgcctggccgcctatattcgatgatttcatatatttctcctaaacacaaagaggactgagatttccacctcagccctcatcacttcgtatttcttatttaataccgtatttcttattgaacttatcaacacggccacgagcctgtgttgctttctgctgacctgtgtagaatggatgacacttggagcagatttctacgtggatgttctcctttgtagatcctgtaacaaatgtgtttccacagttgcatgttacagttgcctgataataattaggatggataccttcgcgcatgattttcacctctctatttttaaattacttattattttctctaaacagctttctaattgtatcacacattttttaataatgcaatacctttttagataaatttctgacggatgatctgctgaacaagctcttcgtttgtttttgtacgagaaaacatattcaaaagattgtccactgcctcttctgatttcatgccgttcattgcttttctcataatataaactgcatcctgttcttcctttgtaagaagaagatcttctcttcttgttcctgattttggaatatcaattgccgggaacactcttttctcctgaagctttctgtcaagcatcagttccatgttacctgtccccttaaattcttcataaacaacatcatccatcttgcttcctgtatcaaccagtgctgttgcaagaatcgtaaggcttccaccttctctcatatttcttgctgctccgaagaaacgctttggactgtaaagtgctgccggatcaagaccaccggaaagtgttcttcctgatggtggaacgatcaggttatatgctcttgaaagtcttgtgatgctgtcaagaagaatcataacgtcttttccatgctctaccagacgttttgctcttgagataaccatttctgatactcgtttgtgatgctccggaagttcatcaaatgtagaatgaatcacctctacattcggaccttcaatggcctcacgaatatcagttacctcttccggacgttcatcgatcaacagaatcagaagatgcatattcggttctgtcttctgtacagataatgcaacttcttttaataatgtagtttttcctgctttcggtggagatacaatcatacctctctgtccctttccaataggggaaacaagatcaacaatacgcattgctgttgtacagcccggattctccagacggattctctgattcgggaaaatcggagtcaggtcttcaaagttctttctcttcattgcctctgccgggcgcagtccattgatcgtagacacataaagaagtgcactgaacttttctccctgcgtcttaactcttgtatttcctgtcaggatatcgcctgttttaagtccgaatctgcgaatctgggaaggagcaacatagacatctccatctcccggaagataattgtcagaacgaatgaatccatatccatcctgaagcacctcaaggattccgtttgctgtaaaaccactgtccagctgttcaatatctgtctcttcttttttttcttcttttacttcttctctcgcttcttctgctgcctctttctgctcttcctgctcatccagctcaagcattgcatcgatcagatcgcctttctttaatgtagaaacacctctcatctttcttgcttttgcaagttctttcaatgttgccagcggcaatgattcatatttttctcgtgtcatattcttttcctttcttttcaggtaaatttgttctgtcaatccacttcacatgtgcccttttcacatactggattattcattcatacttcgggaatacaagtctgattcgactttaatggaaatttgctttaaatatggtgttattatacagtatatttttctaaaaagaaagaactttttgaacttttctctgttttcctgtacttgcgtgtttcctttttcagtggtatcattaattcaatcaaatcagagaggtataaaatcatgacaaacaatgaaaaagctttaaaaatgcatgaagaatggaatggtaagatagagacaaccgccaaagcgcatgtcaactcaagagaagatcttgccatcgcttatactccgggtgttgctgaaccttgtaaggtgatcgcacaggatcccgaagccgcatataaatacactatgaaagccaatacagttgctgttgtatctgacggaagcgctgttcttggtcttggaaacatcggtgcacttgctgctatgccggttatggagggaaaagcggtcctgttcaaggaattcggtggtgtcaatgcagttccgatctgtctggatacacaggacacagaagagatcattaaatctgtagtcaacatcgcaccggctttcggcggaatcaacctggaagatatttcagctccacgctgttttgaaatcgaaacacgcctgaaagaacttctgaacattccggttttccatgatgaccagcacggaacagctatcgttgtcctcgccggaatcatcaatgccctgaaagtaactggaaagaaaaaggaagattgccgtgttgtagtgaatggagccggatctgccggagttgctatcacaaagctgcttctcacttatggtttccctcatattacaatgtgtgacatcaacggaatcatttccaagaactcaccgaacctgaactggatgcagcagcagatgactgaagttacaaatctggaagaacgcacaggaacacttgccgatgcattaaaaggtgctgacattttcgttggtgtttctgctccgaatattgtttctaaagagatggttgcttccatgaataaggatgcgattctgttcgccatggcaaaccctgtaccggagatcatgcctgaccttgcaaaagaagcaggtgccaaagttgtcggaacaggacgttctgacttcccgaaccaggtaaacaatgttgttgcattccctggtattttcaaaggtgcattagaaggacgtgccacacagattacagaagaaatgaaacttgccgctgccaatgcaatcgcaggtcttgttccggaagaagaattgaatgaaaacaacattcttccggaagcctttgatcctcgtgtagcagacacagtaagcaaagcaattaaggatttaatctaatatgtggggagagaagcgctaccactctcttgactatgcactgaaatcccagtttggagagaaagtatatcgcattgcattgaacggcggtatgacttgtccgaaccgtgatggtaagatcggatatggcggctgtattttctgcagtggtatgggttctggagattttgccggttctgcctgcaaaacgattacagaacagcttgcagaagggaaagccattcttgccagaaagcgtccggtgcatgcttatatcgcatatttccaggcctttacgagtacctatgcccccatagaatatttgcggaaagtttttacagaagcaattgaggaccccgatgtgaaagtacttgcaatcgcaacccgccctgactgtttagattctgatgttctggaacttttagatgaattgaatcagatcaagcccgtctgggttgaacttggtcttcaaaccattcacccagaatccgccagatacattcgcagaggctatcctttagaggtatttgatactgctgtgcatgaactgaaacgccggaatctgactgttatcgtacatgtcattttatttctgcccggagagactcacgaaatgatgcttgagacaatcgaatatttgaatcattcaaatattgacggaatcaagttgcagcttctccacattttgaaaggaactgatcttgcagttgaatatcagaaatgtctttcagatcctgcttataccggtcctgctttccatatcccggatgcggacgaatacatccgtctgctcactgaatgtatccagcatttgcgtccggaaatcgtcattcaccgactgaccggtgacggaccgaaggatctcttgatcgcacctctgtggacaggcgcaaaacgaactgttttaaatcagattcacaaatatatgaaagatcatgacttgtaccagggaaaggagtattatggctgaaacatttacattatataaactgatcgtgttgtacatgttggatagagtcgattttccgcttacaacttcccagatatcagaattcattctggataaagggtatacaacttattttcgtcttcagtctgcacttgcagaattaacggattccgggcttctgaaaattgagctgacacataatcgtacgctttataatctcacagaagaaggagctgctacgatcaactatttcagaaataaaatttctcctgagattcgtcaggaaattgataattttatcaatgagaaaaaatatgatctgaaagaagaggtttctgttaaatcagattactatctgaatacaaaccatgaatatgaagtaaaatgccagattttagaaaatggctcccacctcattgatatgacactcactgtgccaactcagactgaggcagaagccattgtaaataactggaatcgaaagaatcaggagatttacgctttactgctctcgcagcttctgtaaacgctccttgatctgtttctcataaccaaggtcgccgggttcatagaacctggcgtcttttatttcatccggaagatactgctgatccacataatgatttggataatcatgtgcgtacttatatcctattccgtgtcctaatttctgtgcacctttataatgtgcatcctgaaggtgtgtcggaaccgttgttttattgttccgtactgcatcattcgctgcaaatattgcattaacggcagaattactctttggcgcagatgccacataagtcaccgcctgtgaaagaatgatctgagattccggcattccgatccgctcaactgcctgtgcagccgcaaccgcaacagtaagtgccatcggatccgcatttccaacatcttcagatgcacagatcataattcttctcgctataaacttcacatcttctcctgcatacaacatctttgcaagataaaagaccgctgcatccgggtctgagccgcgcatgctcttaataaatgcagagataatatcgtaatggttatctccttttttgtcataattcaccactcgtttctggatgcattctgacgcaacatccagagtaatatgaatttgtccatcttcgcttctgtccgttgtcagtacacccagttcaatcgcattcagtgcgtttctcgcatctccacctgacacatctgccaaaaattcaagtgcatcatcttctatcactgcatgaaagcttccaagacctttctcagtatcattcactgcacggagaagcagttccttaatatctgtcttctccaatggacgcaattcaaaaatacttgatctcgaaatcaaagctccatttacctcaaaataaggattctccgttgttgcgccaatcaggatcaacgttccatcttccacaaatggaagcagataatcctgctgccctttattaaagcgatgaatttcatcaataaaaagaatcgtcttttttccatacattccctgcagatcttttgcttctttcactacttcttccatatctttctttccggcaactgtcgcattgatctgtttgaactctgcgctggttgtatgtgcgatcacctttgccagtgttgtctttcctgttcccggaggtccgtaaaaaatcaaagaactcagcttatctgccttaattgcccggtaaagcaatttatcttttcctatgatatgcttctgtcccactacttcatccagtgtcaccggacgcatcctggatgcaagcggggattccttctctttatttgtctctctcatataatcaaataaatccatctttctctcctgttttcaatcttatattcacatcttcaatccataatcagatgatccactgtcacaaactcatagccttttccctgcagcagatctacaatccgtatagctgcctgcacagaagaaggataacaatcatgtaataaaataacatctcccggatttatctcttccacaactgtttttacaaccgcccctgtatcttcggtcatccagtccagcggatccaccgtccatccgatatatattctgttcagatcttgttcgctgtccaccgggagttccccgtaaggcgctcttacaaacaccggttgttttcccgttatcttttcaatcactgtatctgtctgttccagttctttctttgcttctcccgtttccagctttgacagattgcaatgcgtataagtatgatttccgatcaaatgaccttcttcatacattcttttcacaattttttcattctcgtctttttctacattttcgccgatcagaaaaaaggttgcccgcactttacgttccttcaatccatccagtagaatcggggtcgaggatgcatttggcccgtcatcaaatgtaagcgcaacaaccggttttacctcatctgatacattctgacttcgcactgaatcagatgaaacgctcattgtttttctcccatccatctttatcagaaatggggacatacccaaaaacaccagaagacagaaaaactgtactacataaccccatctttttccagacatcatgacagcttcccgcctttgacattcttactctattcttatgtcctgcacctcggcatcattccttcttttttctatgcttttctctgtattccgtcggacttgtcttcttcactttccggaatgccttcgaaaaataaagattattctcaaaaccaacagaatatgcaatcgccgaaaccgacagccccgtctctttcaacagacggcaagcctgctggattctatattctgtcagatattcttttggcgaacaattcatataggtctgaaaagagcggaacagatgacttctgctgattcctacatagtctgcaatatcttccaccgtcacgggataagaataattggtttctatatagttttctgccttttctacatacaaaagctttgcatctctttcctgatcttccccctcatgatagtgcataaagactgacagaagactgtaaagtgctcctgtcatggcaaccgcttcttcatacccattgctctttgcattataaatctgttccaatccattccgaatctggtcatccggcacatttcctctttttaaaaaaggacgttctttcaaaaaacctgtatttcgaatgatcgatgccgcatccgtccccatgaatcctgcccaggcatattcccatggctcctgctgatcggcataatactttacttccacgcccggatataagataaaagtatctccggcttctaatttccatgtcttttctccaactgtatagtatcctgctcctgacaaaatatgatggatacaataatgatccctgactccgggtccccactgatatcctgcttcacacctttgatatcccgtgttatatacagacagcgaagtcatcagaatttctcctgacttatacgaatgtttgtaagtctctgccatcttccggctcctttcccgtatcctgtgatctatgatgtgagtgtcaaaagaaaattttgccactcactgctgtaaccggattgctccattgctatgcaattcccgcaatcctcatcatcattattataacacctcgtctttttaatgcaacattattacataccacagcacgtattttttatagacgtttccactcgttaacgctataataaatataaataaatcagatcgatacgattactttaaatggaggtaaataatgatgaagaaaaaattgtttgatatgtttgcagaactttttggtgattccgaaggagctcgtttttacttttctcctggacgcgtgaatctgattggtgaacacacagattataacggtggacatgtatttccatgtgcactgacacttggtacttacggtgccgcacgcaaaagagaggataacaagatccatctttattccatgaatctggactcctttggtgttgtagaagcatctcttgatgatctgacaaataaaaaagaatacaactgggcaaactatccgcttggtgtagtctgggcattcaaagaaaaaggacatacaatcacaagtggttttgatatggtaatctggggaaatatcccgaacggttccggactttcctcttctgcttcccttgaagttctcactggtgtgatcctgacagacctgttcgagatcaaagatctttccatgacagatcttgcactgatcggccagtattctgagaataacttcaatggatgcaactgtggtatcatggatcagtttgctgttgccatgggtaaaaaagaccacgcaattttccttgatacaagtgatttaagctacgaatatgcaccttgtgttcttgatggtgccaagattgtgatcacaaacagtaaagtaaagcatagtcttgttgattctgcttataacgacagaagaaacgaatgtgctgctgcactgaaagcacttcagagcgaacttgacattcaggcacttggcgatcttactcctgaagaattcgaggcacacaaatccttgatcaaagatgagatccagttacagcgtgcaaaacatgctgtatacgaaaaccagcgtacaatcgatgctgttacagcgctgaaagccggagacattgaaagattcggaaaattaatgaatcagtctcacatttcactgcgtgatgattatgatgtatcctgtgaagagattgatatccttgtagaccttgcatggaagattcctggtgttcttggttcccgtatcacaggcggcggatttggcggttgcacagtcagcatcgtaaaaaatgaatccatagatacatttatcgaaaccatcggaaaaacatatcttgaaaaagtaggacatgaagccgagttctacacagtagatatcggagacggtgcttctcgtctcgactaatactcgtctctactgagatcagatatgaaataacgtatattttgttataggaatgccattggcattccctaatttaaggaggtccttgacatatgctttatgatgcgatcaaaaaattagtacagtacggaatcaataccggaatcactccggaatccgaaagaatttatacaacgaatcttcttctggatctgttccacgaagataactatgaagatgttgactgtgatctgaacaatcttgttctggaagacattcttgcagaacttttagatatcgccgcagaacgcggaatcattgaaaacagcatcggctaccgtgatttatttgacacaaaactgatgaataccctgatgccacgcccatcacagatccagcagactttctgggaaaaatataaagtttctccggagacagctactgattattattacaaattaagccaggacagtgattatatccgcagataccgtattgctaaggatcgcaaatggacggttgacacaaaatacggcactcttgacattacaatcaatctttccaaaccagagaaagatccaaaagcaattgcagcagcaggaaaagcaaaatcctcttcctatccaaaatgtcagctctgtatggaaaacgaaggatatgcaggacgccttgatcatccggctcgtgagaaccacagaatcatcccgatcacaattcaggataacccttggggattccagtactccccttatgtatactataacgagcactgcatcgtattcaacggacagcatgttccaatgaagatcgaccgcaacgctttcgaaaagctttttgatttcatcaaacttttcccacactacttcctgggatccaatgcagaccttccgatcgttggcggttctatcttaagccacgatcatttccagggtggaaattatactttcgcaatggctaaagctccgatcattgaacacttcactgtgaaaggttacgaagatgtaactgccggtatcgtaaaatggcctctgtctgttatccgtcttcagagcaaagaagtaaaacctctgattgatctggctgaacacattttaaatgcatggagatcttatacagatgaagatgctttcatcttcgctgagacagacggtacaccgcacaacacgatcacaccgattgcaagaaagcgtggagatctctacgaactcgacctgacattgagaaataatatcaccacagaagaacatccgcttggtgtctaccatccacatgctaaactgcaccatattaagaaagaaaacatcggtcttatcgaagtaatgggacttgctgttctccctgcaagattaaaaggagagatggaacttctgaaagattacatcttgacaggaaaagatatccgcagcaatgaacagattgcaaaacacgctgactgggtagatgaattccttccgaattacacatccatcacagaggagaatgttgaagagatccttcagcaggaagtcggaaaagtattctgcgaagtactcgaagatgccggagtttataagtgtaatgaaaaaggactggaggcattccatcgttttatagggatgttgtaatttgttgaacttggattcattatcactcaaataagtactttttaataaaaacagacgtgagggagccattgtattgcatcggacaccggcccgctttacctcatccctttgacaatctgtaacgaaaaagccagagcactcaccgtgtgtgattcgtgtctggctttttctaacagattctgcaaagtgtattcggaacgctcctgccttaaatgtgtcctcaacaatacaatggctccctcactcggtttttcaaatgagtagtacctgttccaagtggaacgaatccagaaaacaaaatacaaacttagtacgtgcgtaaaaaggggacgattatcttagtcgataaaacatccgtttacgtttatctacagattctgtgatttgttttctggatttgtctgattggaattaaatatcccatttggaatatgtaagcaaggacagtcctgctgttgccacgagcacatgtaaggcaggagcgttccgaatacactttgttcagtatgttagtaagagccagaacaggcaccacacacggtaactgttctggctcttatgttacatactttcaaagggatgaggtaaagcaggccagtgcttgtggtaatagcagggctggccttgcgttcccttttcctgcaaaactgattatttcaactctcaaaatccaagttcaacaaacacacacccattagtacagcttcgcactgatcagttttggtctgaatccagacttatcaagtgtatccagaatcttcttcttatgatctgttccgaatgcttccattgtgatacgaagctctactgctgcgtttctgtttgtgcttacaaactggttatgctccagcttaatgatgttaccctgtacgtctgcgactgtctgcgccacacgtgcgagttcacccggcttatccggaaggagtacggatacggagaagatacggtctctctggatcaatccgtgctggacgatcgaggacattgtgataacatccatatttccaccacttaatacacagactactttctttcctttgatgtccatctgctttaatgcagctacggaaagaagtcctgaattttctacgatcatcttatggttttctaccatgtcaaggaatgcaccgatcagctcatcatcatctacgagaagaatatcatctacattctctttcacataaggaacaactttatctccaacttcttttacagctgttccgtctgcgattgtatttgcagatggaagttctacaggctctcctgctttcagggctgctgtcatactggccgcttctgacggctctacaccgattactttgatctttggattcagcatcttggcaagtgtggaaatacctgtgatcagtccgcctccaccgattggtgcaaggatataatctacagtcgggagttcctgaacaatctccattgcgattgttccctgtcctgtagcaacatcaaggtcattaaacggatgaacgaatgtatatccgttctcttctgcaagtttacatgcatatgcgtaagcatcatcataaacatcaccatgaagtactacgtctgctccaaagctttttgtacggtttactttgatcagcggtgtaactgtaggcataacaatcgtagctttgcatccaaactgttttgctgcaaatgcaacgccctgtgcatgatttcctgctgatgctgtgatcagtccacggcttctttcttcgtctgtcagtgtgctgatcttgtaatatgcaccacggatcttataagctcctgtgtgctgcatattttccggttttaaataaacctttgctcctgtctgtgcacttaagtattcactgtaaatgagttttgtaggatttgttaccttttttaccagttcgctagcttcttcaaatttctctaatgtcatcatggtctttcttcctctctgtaaaacaacgcgtttacgaactcctctgagtcaaatttctgcaagtcatcaattgtttctcctacaccgatatattttaccgggataccaagttcagactggattgctactgcaattcctcctttggctgttccatccatctttgtcagaacaattcctgttatatccgttacttcattgaattcctttgcctgggcaagtgcattctgtcctgtcgttgcatccagcacaaccagcgtctcacggaacgcatccggatactctctgtcaatcacacgattgatcttcttaagctcttccatcaggttcttcttattgtgaagtcttccggctgtatcgcacagaagtacatctgcccttctcgctttcgcagcagcaaccgcatcatatacaactgatgccggatctgcaccttcctgaccgccgatcatctcaacaccggcacgattggaccattcttttaactgctctcctgcagccgcacggaatgtgtccgctgccgcaaggatcactttcttattctgtgctttcagctttcctgcaagtttaccgatcgttgttgttttaccaacaccatttactccgatcacgaaaaccacactctgacgattctcaaactcatatgctgtctctccgacatccatctgttcacgaatactgtcaatcacaagctgtctacattcaatcggttccttgatatgttgctcttttactttaacctttaaatcttcaataatgtccattgttgctctgacaccaagatctcccatgatcagagtttcttccagttcttcataaaagtcatcatcaatctttgaaaatccatggaaaatactgtccatgccggacacaatattatctcttgtctttgtcagaccggatacaagtcgtttaaaaaatccctttttttcttctcccattttcagcctcctgttctcttaataccctgtttacaataaaaacaggtttatttttccagatcatcttccaacagatccactgaaacaagtgtggatacccctttttcctgcatggtaattccatacaaccggtctgctgctgccattgtaccacgtctgtgggtaatgacaatgaactgtgtatattttgtcagcttatgtaaatatttcgcataacgatctacattgttgtcatccagtgccgcttcaatctcatcaaggagacagaacggagatggcttcagattctggattgcaaatagtaatgcaattgcagtcagcgccttctctccacctgaaagctgcatcatattctgcagtttctttccaggtggctgtgcgatgatgcgtattcctgcctcaagaatatccacatcctcctgtaattccaatgatccctttccgcctccaaaaagctgacgaaatacatcattgaactctgtcgcaattcttgcaaactgttctgtaaactgcttgcgcatcgccacatccaattcttcgataatctgttcaagagatgcttctgcctctacaagatcatcatgctgaccttttaagaatgtataacgctcggatacatttttgtaatcctcaattgcattgacattgaccgaaccaagctttcggatctcattcttaagttcctggatctttttcttcatcaatgccagatctgtcagtgtctcattacgaagttctttcgcatgattgtaagtgagttcatactcttcccacatataattcatctgcttctctgacgcttcctcatagccttctttctggctgttcagacggaaacattctttatcaagatctgacacatgctttgcaagttcttctctctgtcgtaagaaatctctgtgcttctgattcagttcttcgcgttttttactctgtactttaatctcttcaccaatctctataaacagttcttttgaatcttcaatcgttttcctgagtccttcgatttcattttctttttgcagaatttcctcagatacatctccacgattttcggcaagttcttcctgctctttttcatatctggtgatttcctcatctatacgggaaatattttctacaataaaggttttctgctgatccaggcctgccagtgagagatggacttcctcagactgtttcatctggacagcctcatcctctctttctttctccaactgcatctgcaaagcttcaatctgttcattcagttctttttccaacttctctgatgtctcaagttccatctggatagaatcttcattctcattgatttcatccaactcctgaagcaatgctttctgttctttcagaaatccttcgtaacgctgttttgattctaactgttctctctgtacctgcgcaacattcattcgtgcagtattctccagcaccgattcttctcttaaatgttcctgtacttcatcgattacactatagcatgctgcacgacggttcttcgcctctgtaacttctttttccagcacatccatgtcagacttgagcatagcaaccgtcttttcaaattcttcgatttcgcggcgtctgctcagcagattacttgaattcttaaatgcaccacctgtcatggatccgcccggattgatcaggtcaccttccaatgtgaccagacgcagagactggcggtattttctcgcaattgcgattccgtgatcaatatggtctactacaatcgtgcgtccaagcagctgatctgccagtccgtcaaatcttgattccacatggatcaatgtattcgcaagtccgatcacgcccggctctttgagtgcttccggattcctgattcctccgccgccatgcatacttgtcagcggaagaaatgttgcccttccgaatttattacgcttaaggaaatcaatcatacgcttggctgtatcttcattatctgtaacaatattctgaatacttcctccaagcgctgtctcaatagcgatctcatattccttatcgaccttaatgatatccgctacaacaccgatcagacctttctcacgttctttattcgacattacctttcggatactgttaccatatccgtcatagcgctctgtaatattctttaatgactccagacgggaagactctctgtgataagcggtctgtccgatccgtaacttttcctgcttctctttcagctcattctgaagcttgccaagttcctgttcgttcagggaaatcttatcctgataggtttgaatgcgctcacggatctgaccaagttcttcttcatacttcttaagtctgttgttctgtccttctgctaccgtcgaaatctcaagaatatttctggcaacgacagccttccgtgtctggatctgttctttcgtcgtatcaaaatgctgaatcttagcttttgttgaagcacgatttccaagcagatccatgatctcccgtttcttctgctcaatttcagtactgtgttctgcaatctttgactgaatctcaattaaactctgctgtgcttccgtatcctgtccactggctgattctaactgttctgaaattcttttcttctcttcttcaagctctcttttctgctgctgccttgtatctatctcactgacgatcgtactcaggcgatgatcataatgctcatcattcatacgggctgtattaatctgctctttcaggacattgatctggccttccagctgttgctttaaaagattcgtctcattcatctggttcttcgcagtttcaattgcaagatcaatctgatctacttcttcctcgattgcctcgtattctgctttcatcttctcataacgggcatttgattcctgcatctcctgagaagcaatctcatatttcccaccgacttcacgaatacgctcctgtagccgctcttcctccagcaaaaacatattaatgtcatatgtttttaattcttctttcatcttcagatagattctggctgtctctgactgtctttccaagggaccgatctgtttctcaagctctgcaagaatatcattcacacgggtaagattctgccgttcatcctccagctttttcaaagaaagggactttcttctcttatattttacaattccggcggcctcatcaaaaagttctcttctctcttccggcttaccgcttaagatcttatcaatctgtccctgaccgataatcgaatagccttctttaccgatacctgtatcatagaacatctcattgatatctttcagtctgcaggctgaaccattgatcagatactcactctctccggatctgtacaatttacgtgtaacagtgacttcttcgtactctaccggaagtttatgatctgaattatccagtgtgattgcaaccgaagcataactaagcggcttccggttctcggttcccgagaaaattacatcctgcatggtgcctccacgcagctgcttcactctctgctctccaagaacccagcggacagcgtcagcgacattactcttaccacttccattcggtcctacaatacctgtaattccgttatgaaattcaaatttaatcttattggcaaaagatttgaatccctgcacttctatactctttaaatacataaagtcctctttactttttctttctgagattcaggattgcctcataagctgcctgctgttctgctgacttcttcgagcttccttttccacgtccccaggcttttcccccgattcttgcttccacttcgaaaatcttattatgatccggtccctgttcatcaatcagttcataacttacattccccgtcatattcgcctgcacgatctcctgtaagatcgttttactatcataaaagagttttttatcctctaaatctgtcaaaataaaatgatggataaactcttttgcattagtaaaaccaccgtcgagatagatagcaccgattaatgcttccatcgcatcagatgtgatagaatctctttttcttccaccggtcgcctcttctccttttccaagaagcaagtaatctccaagtccgatatctcttgcacacattgccagagacggttcacataccatacttgcacgtgtctttgtcagttctccctcagatacctttggaaattcattaaataaataagcacttgataccaattccaatactgcatctccaagaaactccaggcgttcattacactcatatttcttcaaatgtttctcatttgtataagaactatgcatcaatgcacgttcaatcaggcttttgtctttaaacacatatccgatcttttgttccagttcttttactctgtccatttaaatggcctccttcgtgttaataaacgaaaaagcccaaacgggctttttcatctcactatctgattattcattagccttctttttctggatctgatcaacagcatcctgcactgttgtgatcttctctgcctcttcgttatcgatctcgatgtcaaaatcttcttcaattcccataatgatctggaaaatatccagagagtcagctccaagatcatctacgaatgtagtatccggtgtgattgtctccggtgaaacattaagtacgtccgcaataattgcctgcagtttttcaaattctgtcattgtaaaactcctcctgtcttattcgacttctttcttttcttccagggtctcctgttgaattgcctcttttatcttctcattgatcttctgctccttaaatgcaacacactgaatgattgagttgcatacctcctttgactttgaacttccatgtgtctttactacaagtccgttcaggccaagaagcggtgcgccgccatactcacttgtatcaaaatctttcagtacgccctttaaagcaggtttcacaagcagtgcccctatcttactacgcaaagaagaaagcattcctttcttcactttcttaagcagtgctcctgcaacaccctcataaagcttcagaataatattacctgcaaatgcttcacagacaatgacatctgctgctccgtaaggaatatctcgtgcctcaacacttccaatgaaattgatgtcaggacattcttttaacagtgggaatgtctctttcaccagcgcatttcccttctcttcttcagcaccgatattcacgataccaactgtcggattcttctttcccataacgctttccatataaatggatcccatctttgcaaactgtaccaggtgagatgggcgtgcgtctacattagctccacaatcgatcaaaagtgaaacaccttttaatgtaggaatcagtggtgcaagcggtggtctttcaacacctttgatcctgcctacaagaacctgtcctccaacaagaacagctcctgaacttcctgcagatacaaaagcatctgcttcccctttcttcaccatcttcatcgcaacaacaatggatgaatctttcttaccacggattgctttcactggaggttctgccgtctcaataacctctgtagcattcacaatctcaatctgctcctcaggatacgtataagcggagagttccttgcgaatcacatcttccttacctgtcagcagtaccttgatatcttttctcttccgcactgcctctacggcaccttttacaatctctcttggtgcattgtctccacccatggcatcaagagcaacccttgtaatctctgacatatcatttcctccttgcgctactgaaattattctactggatatcagtataaaaatcaataaaaaaaggcgtaaaacacaaagtttttacgccctcaagtgttctgttcgcagtacactcaatatcttattgatcattagtcaactgaaacgatctcgcgcttgttgtaagatccacacgccttacatacacggtgtggcatcataagctcgccgcacttgctgcatttcaccagattcggtgcgctcatcttccagttagctcttcttttatctcttcttgcttttgaagatttattctttggacagattgacataggttacacctccttaaaattcttaaataagtcacggacaactgacattctcggatcaagccctgtatcttcacagttacaagaccccgtatttaaattctgaccgcatacattgcataatcccttgcagtcttccctgcaaagtactttcgtcggccagctcgacaaaatctcatgaaagagcagtttgtccacgtcaagatgatatccgtcaataaagtttgattcatccagctcctctgtcagttctgcgtcggagaggcctacgtccacatgtttcacacaattcagttcaaactcccgtttcacatcctccagacaacggtcacatggaattatgacactcaatctggtctcagctgtgatgagcagttcttttccccttatatgctctactttaacatgaaccggctccttgctgataatggggtaggttccggattgtaaccggatctcttccatctccagccgcacagtttcttcaaccgtcttatgctggtctgacaaaacgtctgataggttaatcaacataatgtatttctcctattcatacctaaactattatatcatggaaaaaatgtttgtcaacagatatttataatttctatcaaaaatattatgaagagcaaaatgtattggatacatttttgtttcttctatgcgcaaaagcaggactgaactgctctcttggcacctcagtcctgcgctcatatacgatataatctttacagatcactatcgtatacactttctcaaattaagatttcttcaattattttacaagcgctaatgtctcacgggcgattgcaagctcttcgtttgtaggaataacgaatactttaacctttgatccttcttttgtaagctcagcttcttttcctctgagtcctttattcacttctgaatcgaagtctactccaaggtatccaaggtatttacatacttcttctcttacataatcatcgttctcaccgataccagctgtaaatacgatgtcatctacaccattcatagctgcagcgtaagatccgatgtattttgctactctgtatgagaatacatccatagcgatcttagctttcttatctccggcattcatagcgtctgtcaggtcacggaaatcacttgaaagtccgcctgaaattccaaatacaccagactttttgttcagtacttccataacaccttcaatgtcaaggttctctttcttagcaatgaactccatgattgcaggatcgatatcacctgaacgtgttcccattacaagtccttcaagtggagtaagtcccatagaagtatctacacattttccgttaagaacagcacttacactggatccatttccgaggtggcatacaattgtctttacttcatcgtaagattttcccattacttctgctgctctcttagatacgaagctgtggcttgttccgtggaaaccgtaacgtcttactttgtatttctcatagtactcatatggaagtccatacatataagccttctccggcattgtctgatggaaagctgtatcaaatactgcaaccataggtgttcctggcatcaatttctcacatgctgcaacaccgatcaagtttgccgggttatgaagtggtgcaagatcattacactcttctactgctttctttacttcgtctgtgattactacagatgaagcaaacttctctccaccatgtacgagacggtgtccaactgctccgatctcatcaagactcttaacaactcctgtcttctcatttgtcaaagcatcaattacaaactgaattgcttctgtatgagttggcatagccagatcagatttctctttctctccgccagccggctgatatgtcagacgtccgtcgattccaattctctcacaaagtccttttgcaagtaccttctctgtctcagcgttgatcagctggaatttcagagatgagcttccgcagttgattactaatacgttcattttcttttttcctcctgaaaaaaccttattattattatccgagggcagctcacactaccctctttgtttcttttgattacccgtaactattttaaaaaatctgtaaacaattacaattattcagcctgtgcctgtacagctgtgatagctacaacgcctacgatatcttcagcgctgcatccacgggaaaggtcgttaaccggagcggcgattccctgtgtcagaggaccgtaagcttctgctttagcaagtctctgaacaagtttgtatccaatattaccagcatcaaggtctgggaatacaagtacgttagcatgtcctgcaaccttacttcccggtgctttagattccccgacggatggaacgatagctgcatcaagctgaagttctccgtcaagagcaagctctggtgcgagttcctgagcgatctttgttgcctcaacaactttatctacatctgcatgcttagcacttccctttgttgagtgagaaagcatagcaacaactggctctttctcaacaagcagtttgaaagaatctgcggatgaaatagcgatgttcgcaagtttctccggatctggattctgctcaagtcctgcatcagcaaagataaatgttccatttgctcccatgtcgcagttcggtactaccataaggaagaatgcggatacgagctttgttcccggttttgtcttcagaatctgaaggcatggacgaagtgtatctgctgtagagtggcatgctccggataccattccgtctgcatcacccatcttaaccatcattacaccatagtataagtaattgctaagaagcagttcttttgcctgctcaggagtcattccctttttctgtcttaactcaacaagttttgcaatatatccttctgttcttgcatctgttgcaggatctacgattgttgcaccggagatgtcgtatgtacctttgttcttctcaatctcctctttgcttcctacaagcaccagatcagcgagtccttctttcagtactgtctctgctgctttgtaagttctttcgtcctctgtctccggaagaacgattgtctttttgcaagctttcgctcttgctttgatttcatcaataaatcccatgatttaatgccacctttctttttatctcacttagtcctattataactcaatcgttttttgtatacaagtcattttatgtgcattttcaaatacaatccgaactttgtaataggatatttgtaagattgttacaattttatcaaacattgtctttttctaagaacattgcgagccagaacagtcacctctcacggcaactgttctggctcttattaaaatttacaccttcaaaaccccttgcttatattcattctgaaacgccgtcttaaacttatctgtcaccactgaggtatacagatttgaagcaagcatatcatgtctgagcattttctgaccaagttccggaagatcgtcaatttcagacattttcgtcaaaaccggaagactgctttccttcgacatagctgtcaaaagctttgcattgtcttttcgaaaaccaagcagacgtgcatacatatgatagccattgtcaatatattcttccacatttgcctttttcgttccaagcataatatgaagcaatgcccggttaactcgggtctgcgtaagttctcgtgtttttaacaaatcacagaactgtttataattaaaaaagttgtttaactgattcgcaattctggatgcaatctccggagagacatccacatatcgaaccagactttctggctgtttatttaacagtttatatttcaaaatcagagaaaaatcattctgtgaaatcggatactgtactttatgataatccttcaaaagttccagacaacattttggaacctggttttccaactctgacagtattcccgaaaacgaaagctcatcgtaatttccttctactggttctgtattgaaagatgaacttgaataagcaagcagtgaacgaattgccgtagcggaactgtaatcactgtccagttcttcatcatgatactgtgcaccacgtcttgcaatcgtataaggttccatcctgcttccaagttttttgattgctttcaaatattcaatccccaaaatattgttcggatttcttaaaatctctgcaaaccgagaatcttctgtataagaaagaattgcttcctgtctggcgcgtggaaaagacatcccttgtttcagataatctttcaacagaatctggtaggcttcaggttcttcaagaagtagttctgcaagctgttccaagattgggagatcatcacattcactgccaaaacagatagaatcaacaattccaagagactctaaaagagatacggatccaagtgcaaaaagctccgcagatcccgtcgcataacagaccggaagttcaaagacagctccagcaccacacatcagtgccatctctgcacgtatccttttaggcatgattgcaggtgttccccgctgcacatagtcaccactcataacaacaacggctgcatctgcaccggttacacgcaaagattctttaatgtgataaagatgtccattgtgaaatggattatattctgtaataagaccaacgattttcataatattctcctaaaaaagcagagtactgctcacaccacgtgtgaacagtaccacctctcaccaatacagattatgtaactgttcagaaccaatttccaaaatgctacgcatttcgtcacagttaccagtttacaatctcttcatgcaagtaatcgccagtgcccccggaccaatatggcaggccacactcaatgacaatggtccttccataatctcatatcccggaaatctttcttcgatctctgctttccactcctgtgtttcttctttactgcatgtgtaagccataccaagagccatctgatccttaacatcggcaaaacgtcccttcagatctttctcgattgcattgagcattgtcttcttcgccgttttccagcctcttgctttcgaaaatgcgtccagcttttctccctggatctgaagaacaggctttaagttcagcacagttccgattgccgctgctgccggtgtgattcttccaccttttttcaggtattttaaagtatccaccgtaatataaatgcttgcctgaagtttttctttctccagtatttctttgatctctgctgcactctttccttcttcacgcagattcattgcatccagaacagactgctcctgtgtaactgaaattctctgattatcaaccacctggacacgtccgtcatattcagctgcaagagtaattgctgttgcacatgtgctgctcaagctactggacatcggaatacatacaagctcatcatattcttccagaactttatcccagagatccatgacctctcccggggatggctgtgatgttgaaatatcggaatctgctccgagtttttcataaaattcactctgggaaagtgtgatatcctccagataaagttctccatcgataaaaaatggcatcggaagaacaaaaatcccaagttcttttccctgttcctgtgttataccgctattactatccgttacaattgcaactttactcatcaaatttctccctcgttaattcttaaaactatgaatcggcgccggaatacgtccctgtctgttgataaacgcatcacatccaaattcattcaccggcataatcggtgcataacctaacagtccaccaaattctgccacgtctccaacatctttaccgatgaccggaatcagacgcactgctgtcgtcttctggttgaccataccaattgccatctcatctgcaatgattccagagattgtcgctgctgatgtctttccagggattgcgatcatgtcaagtcctacagagcatacgcatgtcattgcctctaacttctcaagtgtaagagatcctgcatttactgcatcaatcattccctgatcttcactgaccggaataaatgcaccgctgagtccacctacataagaagatgccataacgccgcccttcttcacctggtcattgagcattgcaagtgctgctgttgttccaggtgcaccaacgcgctccagtccgatttcctccaggatctctgcaatactatctccaactgccggagtcggagcaagagaaagatcaatgattccaaatggaattccaagacgtgcagaagcctctcctgcaacaagctgtcctactcgtgtaatcttaaacgctgttttcttaattgtttcacagagttcttcaaaaccttttccacgtgctttttcaatcgctttctttacaactcccggtccgctgacacctacattaataatcgtatctgcctcagttacaccgaggaatgcacctgccataaacgggttatcatccggtgcattgcaaagaataacaagctttgcacaaccaagagaatctctgtctttcgttgcctctgccgcttctttcacaatctgtccacacagacggactgcatccatattgatacctgtctttgttgatcccacattgacggaactacagattctctctgtctcggccagtgcctgcgggattgaacggatcagattctcttcacttggtgtcattcctttcgacacaagcgcggagtatccgccaatgaagtttacacctactttttccgctgcgcggtcaagtgtacgtgcgattgtcacataatcttccggagtcttacacgctgctgctccaacaagcgatacaggtgtaattgaaattctcttatttacgatcggaattccgaattctttctcaatgtcttttcctgtagatacaagatcttttgcaactgttgtaatcttctcataaatcttacggttcagttcattcagatcagaatccacacagtccaacagactgattccaagagtgatcgtgcggacatcaaggttctcgctttcgatcatcttattggtttctgatacttcatacatattaatcatagtcttatcctcaccttatctccgacttcttacagacggtgcattttctcaaaaatctcttctctctgacaatgaattgttacaccgatctctttgccaagtacatccatctcatcacaaacttctttgaaatctttcttcagattcgcaacatccacaatcatcatcatgttaaaatatccctgaacaattgtctgtgaaatatcaagaatattgatttcatttcctgcaagatatgtacatacttttgcaataattcctactgtgtcttttccaagtactgtgacaatacatttcttcattctttctgtacctccgctttgattcactcaattttatacattaataatatccgaaaccgattcccggcttgcaacgaacatattcaggtcttcccctttatattcattatctgcaagcgtaacttccaacttcactgtctcataagcaagtcttgcgtaattgttctccttgctcagatgaccaagcatgatgtgtttcagattatcatgtagtatatcacaaagaagctgtcctgacaattcatttgataaatgaccgcgatcgccaagaattctctgcttcaaataatatggatatcctccgacttccagcatatggatatcatggtttgcttccagaaggatcgcatccagatttttcagattcttcactgtataatcatcatattttccaagatctgttgcaactgctacggacttcccaccttgttcaatacgatatccggacggttcatttgcatcatgggaaatagcaaatgggtgtacgtccagttcaccaagccgaaatggatgatctgtcttaatcggatgtaaaagtccttccggcatctttccaagactggaagactctttgattcctgcaatcgttcccggagtcgcataaattggtatctcgtactttctgctgaacacaccaagtcccttaatatgatccgaatgttcatgtgtgatcagaattccatcgagttcgtcccctttaatctccaacttattcagaccttcttcaattcgtttcttactaatccccgtatcaatcagaagatgggaattatcacttcctacatagatacagtttccactgctgccgcttgcaatactgcacattctcatttgttcaatctatctcctatttgtctctttgttgcttcaaagtctccactattatcaattacaactgtgcatgcctttcgaaatacttcttctaccggttgtgaagcaatcatcctggtgatcttttcatccgtataatgtctggaacttttcagtcgttctctccgaaccgcttcatctgtgtaaatataccataattcatcgcacagttccttcccaacttccggaagaagtgctgcttctacaatataataagaacaacactcttcttttttcttcaagatatctttccgaacccattccagcacttctggatgtacaatatcattcaatctttgtaatttcttctcatctgcaaatacgcagcttccaagtttcatgcgatccaattcaccatctgctccgacaatctgttcaccaaattcctgtacgattctcgtgaatgcccgcgtccctttcttctggatctgctttgcaacttcatccatctggcagactaccgcaccgtattcctgttcaagaaattttaaaatttcactttttccggagccaactccacccgtgattccaattactttcatcttattttgcctcataccagttcttccctgtatgcatatctacactaagcggaactaacaattctgctgcgtgttccatcttatcctgaaggatctgctgtacttcttctaattctgtttcatctgcttcgatcaaaagttcatcatgcacctgaaggatcatccgtgatttcagatttctcttcttcagttcttcatttacatgaatcattgctattttaataatatctgcagcagttccctggatcggtgcattcattgccacacgctctccaaaacttctctgcataaaattgctggattttaattccggcatcggtcttcttcttccatataaagtctctgcatatcctttttctttcgcatcgctcacacatttatcaagaaatgtcttaattcccgggtaggattcaaaataatgctcgatatactgtgccgcctcttttctcgaaatactcagatcctggctcagtccaaaagaactgattccatacacaatgccgaaattaactgcttttgcatttcttctctgcagatctgtcacttcatcaaatggtacatggaatacctgggaagctgtcattcggtgaatatctctcgcttcacgatatgcctggatcagctgttcatcaccggaacaatgcgccagaatacgaagctcgatctgagaataatccgcatccacaaagacacagccttcttttggtacaaatactttacggatcagacgtccaagctccatacgaaccggtatattctgcagattcggttctgtactgctgatacgtccggttgccgtgatcgtctgattgaatttactgtggattcttccatccatccctatataatttgcaagtccgtctgcatatgttgacttcagttttgcaagctgacgatactccagaatctttgctacgataggatattccggtgcaagtttatctaacacatccgctgctgtagaatacccggtctttgtcttctttgcatgaggcatttccagtttttcaaaaagaatcacgccaagttgttttggagaattgatattaaactcttcccctgccatttcataaatctctttttccagctcaacgattcttgctccaagctcttctccgtaacgcttcagctcttcaccttcaaccttaacaccggcctgttccatatcatacaatgtaaatactaatggcatttcaatttcattaaacaaacagaacattccattctcttccagtttcttctcaagaaccgggacacaggcataagctgtatatgcctcataacatgattttgtaccctcatcaagtttttcatcaattaaaagattcaaatgttctcttgccacatcttctgcattgtaatcatttttcagaggattcagaagatatgctgctacgattgcatcaaacccgttctcacttgtaagctccggcagccattccagatattctttcaatccacacattgaaaaacgtttcacactttttgcaaggtgagacaactttcctgtcagatattcaaaatcagcatccatatcacaaggaatcgtaacaatcttttctgcttcatagcaaagagaaacccttccgtatcctgaagcatgtgcaaacaatgggagaacatttccagcatctttggaaaatgccacaccaacggtctctgctttctccgcctctttaaagactttctcaatttcttcttttcctgttacctcacgaaaatatttttccacatcattcactgacgcttctacatcaaatcttccaagcagatttttaaactccagtctttggaataattcatgagcttcttttgtataaggattctcatgtctggcattttcaagttcaaaggtaatatctgcgtccagtttaatcgtcgcaagtgtcttactaagctgtgcctgctcccagaattctttcagattcttgcttgctcttggcggtttcagctcatcaacatgctcgtatgcattttcaatcgtctggtactgctgaatgatctttgtcgctgtcttttcgccaactcccggaacaccaggaatattatcagcagtatcacccatcaaagcctttacatcaataaattccttcggtgttactccatagcgttcctgcacatctgccgcataataatcttctacttccgtcttcccctgcttcgtctttgggatgcggaccttaatatgctctgtcgcaagctgaagcgtatcacggtctccggaaatgatggaaacatccattcctttctcctcacaacgatgagacaaggttcccaaaagatcatccgcctcaagtcctgccttttcaatcacttctatatgcatcgcacgcagaacgtccttgatcacaggcacctgttgacgcagttcctctgccatcggctttctcgtgcccttataatctgcaaacatctcatggcgaaatgtcggcgcatgcacatcaaatgtaaccgtcagatattccggcttctcttcatctaatatcttaaacataatattcaggaatccataaactgcgttcgtatgcagtccttccgaattcgtcagatccggaactccataaaacgcccggttcaatatactgtgtccatcgatcagtacaattttatctctcatcagattctctcctattatctcttgctttttgttgcatttaattttaaccattattaaagtatacactaattaacttcttttttaaaggttcattttatggtatcattatttaggacttttgactccaatatcttgtaaacaatattttcaaaaatactatcaggagaattattatggatggaattatatttgatgtagatggaacactttgggattctgttgaagttgtagccgaatcctggaatcttgcaataaaagagaactctgatcttgagccaaacttaaaccgtgaaattcttcagggactgtttggaaagacaatggacgaaattgctgccggagtttttcccgatctcgatccggactctcgaagaaaactgatggatatctgttttgattatgaaaaccgctatcttgaaacacatcccggtgtttactacgaaggcgttatggacacactcaaggagctggctctggaatatcctctttttattgtaagcaattgccagtgcggatatattgaagttatgatgaaaggcgcaggcatggaaccatatatcaaagatttcctttgttttggccagacgcagacttccaaagaccagacgattctgaaattaatggagaaaaataacctgacatcccctgtctatgtcggagatacccagggcgatgctgattcctgcaaaaaagccggtattccttttatctttgctgaatatggacttggagatgttaaggaagattatccgacgatacattctttttcagaattaaaaaacattttaagaaagcttgattaacatctctgtttatttaaaacaaactgacaaaccacacgaaacattttctgtccattaagaatttcattctgtttctggtgtgatctgtcagttttttattgctcacgacttttttcataatcccggatcttacgcatcaatccacgataaatcttatcctgaagcagttcccgatgttcatacgatactggatattcattcataaaatcgggatgttcttttatatagcaatccctttcttctttcgtcgcattcaacagatatttttcataataatccatatcatctattttttctttattcatcactttctcccattccccttagttcttatgctgtctcatttctcgcacatttcttcatgtttttatcaattatagtcgtagtacgactataattcaatagttgtgtcaggacttttatataataatccaaaaatacaaaagagatcagattattgttcactggatactgtgaataatagcttgcttccggttaagttcgcacaccggctttaaggtacaaggatgggattatgaaattcgaaaacatacgaaatttgcgagaagataatgataaaacgcagaaagaagttgctgcatacctctacatcaaacagactacatattctaaatatgaacttggaaaaatcaacgttcctattgatgtcttcatcaaacttgctgattattatacagtctcaattgattatctcgttggtcgtggaaaaaagtaaaattacaaagaacaaagaatgtgcattgcacattcttgcgcctgcggcgttgctaagcgccagtggcgcttgtttagcaaggaccgaagtgggaaacgtagaccgcttgcgacgcttacattatacgccgcagtgcgcatccttagcggagcgttttttatatattaggaaagcactttcctaatatataaaaaatctctggatatcttgcaaacattgaatttgtaagatattcagagattaagttcgatgccgctggccggactcgaaccggcacggctactaaccgcttgattttgagtcaagtgcgtctgccaattccgccacagcggcttattctgtcggacaagaaaactttcctgtccgaatcagcttttttatgttaccatatccggtcacatttttcaactattttttatgattttatttgttttttatttgcaaagtttctttccaacctcaaaacaatcaaatgttgcaaaatagtctttcggtgtctctgcacggcgaatcatctgtacacttccatcttctttcaggagcagctctgctgattttaatttaccattatagttatatcccatagagaaaccatgtgcacccgtatcatggattacaaggtaatctcccatatcaacttccggaagcattctgtcaattgcaaacttatcattattttcacacagagaacctgttacatcatatttgtgatcgcacggtgcatcttcttttccaagaacagtaatatgatgatatgctccatacattgccgggcgcatcaggttaacagcacacgcatctactccgatgtagttcttataagtattcttctcatggattgcttttgtcacaaggcagccataaggtcccatcataaagcggccaagctctgtgtagattgcaacatctcccattcctgccggaacaagtacttcttcataaaccttgcggacaccttctccgatcacacggatatcattcggctcctgatcaggtgtgtaaggaattccaataccaccagaaagattaataaacttaatatgtactcctgtttctttctgaagacgtactgcctgttcaaaaagaacttttgcaagcattggataataatcatttgtcactgcattgctggcaaggaatgcatgaataccaaattcttttgcaccttttgccttcagtgtcttaaatgcttctgtgatctgctctgttgtcattccatactttgaatctcccggattatccataatatcattactgatcttgaatattccgcccggattataacggcaactgattgtctccggaatatgtccgattgtcttctcaaggaagtcaatatgtgtaatatcatccagattgatgattgctccaagtttatcagcaagtttaaaatcttcctccggtgtatcattagaggaaaacataatatcatgaccatcaattccaactgcatctgacataagcagttctgtataagaggagcagtcacaaccgcatccatactctttcaagatctgtaaaaggaacggattcggagttgcctttacagcaaaatactctttatatcccggattccatgcaaatgcttcctttaatgcttttgcattctcgcggatccctttctcatcataaagatggaacggagtcggatatgtttttacaatctcttcaacctgttcttttgtcacaaatggtttcttactcattttcattttctccttcgcgtattttgattaattctatctcattcgcaagtgctgttttaaacagcgtaacgaaatttctctgtccggaatagacacaagtgtttctgctctcctgtccatactcacccgaaagtacatatttagaatctgtgatcaaaccaatctgatttcctttttctttcgtcacataaatgattgcccctgaaagttcaaatggatgatctgtcacaagaactaccttttttcctttttctgtcagttcctttaactgtcctttcaactgttccagacagacaccggaacaggaacaatacactctttcttccacattagccagaagattatggatcttatctgaaatatgttcctgaccatcgatcgtaacatatccttcttcttctttctgttctcccgtaagattcatatccaaccacttctgttcttcttccattctgcgaattctgttaccacagaactcctgaacatgaaccggaatatatcgcttggcatcctcttctaccagatatgcagcccctttctcaaccagagctgccagtgatgcatacacattcgaccttgagattcctgtatctctcgcaatctcataccccgtctgctttcctgcttcgatcagccgaagataaacagttgcttcctgccgggacattccaaaatgcatcagatattcaattgctttactttcgtccatagcaccatccctctgattagtagttctttacaggaacactatacagtattgattgttggatgtcaatatattgattgtatttaataagagccagaacagtcacctcgcacggtaactgttctggctcttattaaaagtttttctaatttaatctactgtcacaattctcatcatattacttgtaaagcttctctctttgcttacatttgttgaaggaattccagctgtgataactacaacatctcccggctcaacatactgttttacctgtgccagttcgatcgcattttcacagatatcttctgttgtatcaacttcaagagacttcagcggtcttacgccccagtaaatagacattcttctcagtgttctctcgttcggagttacaccaaggatttcctgtcttggtcttaagttggatacaactcttgaagttgctcctgatacagatggtgtaataatacattttgcattcaggtttgctgctgccagtacggatgaatatccgattgcactggatactccgcctcttaaatgaccgtgctctttctcaagcatgctatcataatcaaggtgtttctctgtctgctcaatgatatgaaccatcatctgaagcgcctcgagtgggtatttaccctgtgctgtctctcctgagagcattacagcatctgttccgtcatatacagcgttcgcaacgtctgttacctcagctcttgtcggacgtggattacgcatcatagaatcgagcatctgtgttgctgtgataactgtcttgaactgatcgttacatttctggatcatcatcttctgaagatatggaagttcctctgccggaatctcaactccgaggtctccacgggcaaccatgataccatctgctgcacgaatgatctcatcgatattgctgattccttcttcattctcaatctttgcgataatcggaatgtaaggagctccgagagacttcagatatgccttgatctcaagaatacactctgcatttcttacgaaagatgcagcgataaaatcaatcccctgctctgctccaaatttaatatcttctttatctttctcagtgattgccggaagtcttaccggtactcccggtacattaacgccctttttctctccgagttcaccaccgttgatgatctcacaatgaatttctttgtctgtttttccgattactttcagtccgatcagaccatcatcgatcaaaataatctttccttcacttacatcttctgcaagtcccttatatgtgatagatactttattctcatcaccaacaatatcttctgtagtaagtgtaaaggtcttccctgtttcaagcttaatcttctttccgtctttcagaacacctgtacggatctctggtccctttgtatccagaagaatagctgtcgttgcatgctcttcctcgcgaagctctttgagcatatccatacgacccttctgttcttcatgatcaccatgagagaagttgaaacgagctacatccatgccattctggatgagttttctcatcagttctctatcatttgtgtttggtcccatcgtacatactacttttgtttttttcatactaagtcaatctctcctttaaaaaatataaccataaagttcctatacacctggagcgaagctgcactgtatcactttcggctgcaactctgatctgatacactgcactgccatacctcatctccggtaaaatatgagaaatatgcgttacacaattctcattttctactttacatgttcatgtgtaaataaatgatcctggcaatactcatagtttccattacattttgaacagaaacggaactccaatgtcggatcatcaagttctgtacgtccgcagactgcacaacggtgtcttgccccattcgcataagtcatatgtggtctcgtctgctgtttaaactttgcttttctcgcctgctctttcggactgaaacgcttcatattcctgctggacaggaaaaagataacaaagttcaataaggatgccgcaatcgcaactttcgttgcgagacttcctgtaaagaaataatacagtgccattgctacatatacgaaagccatccatttcatcttaatcggtaaaataaaatagagtaaaacttccatatccggatagatggaagcaaatgccaaaaagatagacattgtaatgtagttcgtgctgatcaatccgatgcttgaaagtggaagttcaattccatagataagataaaacacaccatacagtatgaatactgcgatcactgtaaaaagtattcctgaaaaaatgtatacattataacggaatgttccccaggttctctcaagtgcagaaccaagagaatagtacaataatactaggaacagtaaagaaatcaaacttcctgttggtgggatcaatacccaggaaataattctccagatctgtcctcttaaaatatatgccggttccagtgtaagccatcctaaaagtcccggtgctaaataataaatagcgaaacctatcacatacccggccagcagatacaccgtaagattcggtattgcaaaacgacctaattttttttctaatttatcaagccagttcaacttgtattctccttctattttcattttatattactgtccactacgtgtggtcagcactcacatcttcgtatagcagtaattgtacaagggaagacttgttttgtcaaacgattgtttttatattaatacacttttaacaagaatatgatattttcctttcctttctacttagacattttgccatattacagctcatttcttcacacttactacactacaatgaccattgtctttttgagaatcttgtcgtataatgttatttattgcgagctaacaaacgcatttaataggtagtaactcatataaatttgacaaattaactgaattacaaaagattggggatattaattatgaacgcaaaaaatctacatactttaggaatcgacattggttccacaacagtaaaaattgcaattcttaatgatgaaaatgaagtcctcttctctgattatgagcgccatttcgctaatatccaggagacgctttccgatctgctcggccgtgcgctttataagcttggaccaatccaggtttctcctgtcatcacaggaagcggtggcctgacacttgccaaacatctcggtgttccatttgtccaggaggtaattgcagtctccactgcactacaggattacgctcctcagacagatgtagcaattgagcttggtggagaagatgcgaagatcatttattttgagggtggaaatgtagaacagcgtatgaatggtgtctgtgccggtggtacaggttctttcattgaccagatggcatctcttcttcagacagatgcttccggtctgaatgaatacgctaaaaattacaaagcattatactctatcgctgcgcgctgcggtgtatttgccaagacagatatccagccactgatcaatgacggtgctgctaaggaagaccttgccgcatccattttccaggctgttgtgaatcagaccatcagtggtcttgcctgtggaaaaccgatccgtggtcatgttgcatttttaggaggtccacttcatttcctctcagaattaagagaagcattcatccgcacattaaaactggatgatgaacatattatcgcaccaaatcactcacatttgtttgctgcgattggttccgcactgaattccaaaaaagatactccgatggaactgcgtgatatgcagaatcgtctcgagaataaaatccaaatggatttcgaagtggaacgtctggatccactgtttgcaacaactgctgattacgaggaatttatttcccgccatgcaaagcatcaggtgccggtaaaagatcttgcctcatacaaaggaaaagcatttcttggaatcgatgccggttcaacaactacaaaagcagctctcgttggtgaagacggaacacttctttattccttctatcacaacaacgacggggatccgcttggtacaacgatcacagcgatcaaagatatttacgatcaactccctgagggtgtagagattgttcattcctgttccacaggatacggcgaagcactaatcaaagctgctctgatgcttgatgaaggagaagttgaaactgtttctcattattatgcagcatccttctttgagccagatgtagactgtattctggacattggcggtcaggatatgaaatgtatcaaaatcaaaaatcagactgtcgacagtgttcagctgaacgaagcctgctcttccggatgcggttctttcattgagacatttgcaaaatctctgaattattctgtagaggattttgctcacgaagcactttatgcacagaatccgatcgatctcggaacacgctgtactgtatttatgaactccaaagtaaaacaggcacagaaagagggggcgtctgttgctgatatttcagccggacttgcttattctgttatcaagaatgccctgttcaaggtaatcaaagtatctgatgcatctgaacttggtaatcatattgttgttcagggaggtaccttctataataatgcagttcttcgaagctttgagaaaatcgcgaactgtgaagcgatccgcccagacattgccggaatcatgggtgcattcggtgcagctctgattgcccgtgaacgttatgttgactgcgaaggcacaacaatgctttccattgatgacatccgttcccttgaatactccacaacaatgacaaaatgtcgtggatgtacaaacaactgccgtctgacgatcaaccatttcagtggtggacgtaaattcatcacaggaaatcgctgtgagcgcggacttggaaaagagaaatcaaaaaatcagatgccgaatttatttgaatataaattacatcgctattttgattatgaaccgctttccgaagaagaggcaaaacacggattaatcggtattcctcgcgtattgaatatgtatgagaactatccgttctggttcacattttttacaaaacttggattccgtgttgttctgtcaccagcttccacaagaaaggtttatgaacttggtattgaatctattccaagtgaatccgagtgttatccggcgaaactggcgcacggacatgtacagtggctgatcaatcagggagtgaaacacattttctatccgtcaatcccgtatgagcggaaagaatttgctgattctgataatcactacaactgtccgatcgttacttcttatccggaaaacatcaagaataacatggacccgatcgtcaacggagaagttgattttatccatccattcttgaattttgaaagtgaagagacgatttcttatcgtcttgtagaagaattaagtaagaagttctctctttccgaaagcgaaatcaagtcagcagtccatgacgcatggaatgaacttgctgcctgtcgtcaggatatgagaaataaaggggaagaaacaatccgtttcttaaatgaaacaggaaaccgcggtatcgtacttgccggtcgtccataccatatcgatccggaggtgaatcatggtcttcctgaattgattacatcctacaatattgcagtacttacagaagactctgtctctcatttgaatccggcagagcaccctctgaatgttatggatcagtggatgtaccactccagactgtatgctgccgcaaattatgtaaaaacaacagagaatcttgatctgattcaactcaactccttcggatgtggactggatgctgttacaacagatcaggttgctgcgatccttacaaattcagataagatctacacaactttgaagattgatgaagtaaataatcttggagctgcaagaatccgcgtacgctctcttctcgccgcaatccgtgtgcgtgaaaagaaacaggaaaaacgtaccattcgtccggcttctatcgaaaaggttacatttacaaaagaaatgcgtaaggattatacaattctctgtccgcagatgtctccggttcattttgaactacttgagcctgctttccgcgctgccggatacaacatcgatgttcttcctaacgataacaaacaggctgtcgatatgggattaaaatatgtaaataacgatgcctgctacccttctctgatcgttgtcggtcagatcatggatgcactgttatccggaaaatatgacttgaatcatacagctgttatcatcacacaaactggtggtggctgccgtgcttcgaactatatcggatttatccgtcgtgcacttaagaaagccggcatggagcatattccggttatctcacttaacttaagtggactggaagataatcctggattcaaactttctcctgcactggttctccgcggaatctacgcagcagtattcggagatatctttatgaaatgcgtttaccgtatgcgtccttatgaggccgtaccgggaactacaaataagattcaccgcaaatgggctgaagttgttaagaagtttgtgtccgaaggatatccatcccgtaagagatttaagaagctttgtaaagagatcatcaatgattttgataatatcgagacacttgatatcaagaagccacgtgttggaatcgttggagaaatccttgttaaattccttccggctgccaacaatcatctggcagagcttctggaaagtgaaggcgccgaagcagttgttccggatcttctcgacttcctgctctactgcttctacaatcagaacttcaaagtttcccatctgggaatgaagaagtccaaagcgacagcaggaaatcttggaatcaaagctctggaatggttccgtgctccggcttccaaagcatttgcagaaagtaaacactttgatccgccggctcacattgaagatcttgcaaaaatggcttcagagatcgtatctctcggaaaccagaccggtgaaggatggttcctgaccggtgagatgctcgaactcattcacagcggtgccggaaatattgtctgcacccagccattcgcctgcctgccaaaccatgttgtaggtaagggagttatcaaagaactccgccgcaggcaccctgaatccaacatcgtagcaatcgatttcgatccgggcgcaagtgaagtaaatcagttgaatcgtattaaactgatgctgtcaacggcgtttaaaaatctggagaaataaagatttgacgtagggattctttttcgagttcggacgaaatcagatatcgcatgtaaagtttattcgaatagacagacatcgagggtttgatgcaggctccgggttctgtatacaggaaagactaagaaaaacgaaagattactaaaaacaaaacaatgctcggcaaactcgctgccgcttcagacagctgcctcgcattgcttcaacgtaatctttcgttttttaagtctttccaagcacacagaacagtcacctgaatcaaaccctcgatgtttgtctatcggtaagttttcagcgatatcagatttctacttcctcgaaagaagaactctacttgagaggtaggcgcaacggaaattctatagaatgatatccatatctcaaacgtttttgcacctaataaaatttagcgttggaatcgattttttaataaacagaaaacagaaaatataagcttcgaggagctttatgttagaaggtgggtatagggacgcagatgaatgtggagcatgcttgctcatacttgaaaaacaatagactgcgtcaaagaaaggattgacagctgtctgagcggcagcgagtttgtcaatcctttctttgcttttagcagtctattgtttttcttagtatgaacagtatgcgtaaccctgagtcggcgttcctatacccatcttctaacaatcaactatctaaaatcatattctctgttttcgtccgaactcgaaaaagaatccctacgataaatctttatttacgatacaagtaaaggattcccccgaaaagacccagaaaaattcctgcgtatcctcctgcacagaggatatctgccagactctgtatcagatctattctgattgcagaacatactcctaatccaaacagtgttccaatgattgtccatcctataattaaaattggcagatatactgcaagtgcatgacctgcatctatataatgatttacaaaactccaaagttttccatacataaaaattaccctctttctactaaaaatgtctaagtgtttttccttttgacaattcttagtatagagggtatttgtaaagtctcattttcttccaatgctaaatctatgtaaaataaatcaaactattgttaaatcgatttactttattcgctttccagaaccaattaccaattcggccacttcctgtggtgttgttgccagagcatctgctcctgcttctgaaagttcttttaaatctccatatccgtatagaacaccgatcactttcagaccttccgcatgacctccaactacatcatatgaacgatctccgaccattacgattttatccagttctttctcttcgcactgttccaagacataacggataacatcttgtttttctgtacgtgtctcatccatacatgccccgccgatcacatcaaaatattgagccagttcaaagtgatctgcgatgattttagcaaatttttccggcttggatgtcgccatcgcaatcttgattcccgcttgtttcaatgtcttgagcatctcttctacgccatcatacacactgttttcaaaaatacctgtcactgtgaaatattctcgataaagagtaaccatctctgctgctttttcttcatcaattccacagtgttccataaactgacccttcagcggtggtccaataaatttacgtaattcatctacgtcaggtgtcggttctcccaccttctccagcgcatattttacggaattcataattccaggacccgaatctgtaagtgttccgtccaggtcaaataatacggtactaattctcatcttcttttcctcatttgctattatcaaattatctttttcaatatccacttgttaacctgcttgatttagaagctacgaatctgatcatcctcttcactttcagtttttatcactttacgaatcaccacataatagccaaaatcatcgttcactttaatatagactctctcgccttctttatgtccgagcagggcttttccaatcggagattctatgctgaccagtccattcaaagagcttcctcttacagatgtcactatacgatatgtttcgacttcatcatcatcttcgcaataaagttctacggtattattcaggccaatttcatcctctttcgaatgatcttccacaatctcagctgtcttgagcattctttccagataacgaatacgactttcgttctgattcttcgcttttttcgctgcgtgatattcgaagttctcactcaagtctccatgagatcttgcttctttcactgcttcgatcaattctttacgttctactaattttcgatgctcaatctctgcctgaatcttttccacatcattttttgtcaatctttcacgcatgacttttcctttcctctctgaactataggcattgctgtacacatctactgcgaacaacaacctatagggaaaaggaaagctatcaattacgataaactaaaacaagcactgttgttatcgcagtcaatagctttcccttttcacttctatcttaatccacgcaattttcttctggattcttttctcttgaaagaatcattcaagttgcctgaatccaaattcaacacttatgaattatttcactaacagagattttcctgtcatctcagccggctgctgcattcccatcagctcgatcagtgtcggagcgatgtctgccaggcatccgccttctcttaatttgtaagccggatcagcatttacaaggataaacggtaccggatttgttgtatgagctgtgaatggctcacctgtctcctcgtcgatcagctgctctgcatttccgtggtcagcgcagatgaacatctgtccgtctacttctttcagagcctctacagcctttcctacacactcgtcaactgcttctacagccttgatcgcagcttcctgaacacctgtatgtcctaccatgtcagggtttgcaaagttgatcacgatcacatcatagttctcagacttgattgctccaacaagcttgtcacatacttcgtaagcgctcatctccggtttcaggtcataagtagcaaccttaggggatttcacaaggattctgtcctctccctcattcggctcttctactccaccattgaagaagaatgttacgtgagcatatttctctgtctctgcaatacgagcctgtttcagtccgttatctgcaaggaactgtccaaatgtattcgtaatagattcttttacgaatgcaaccatcttattctcgattgtcgcatcatactctgtgaagcatacaaatgtagtcttcactctgtctcctctttcaaatccgtcaaaactgtcatcacagaatgttcttgtgagctctcttgctctgtcaggacggaagttgaagaatacaacagaatcattttctttgattgttgctgttgcagcaccgtcttttgttacaacaaatggtactacgaactcgtctgttacatcttcatcgtaggaagcctggattcctgctgttgcggattctgctgtattgccttctcctgcaactaatgctttgtaagctttctccacacgatcccaacggttatcacgatccattgcatagtaacgtccggatacagatgcaacttcacctacaccaatctctttcatctttgcttcaagctgctctacatactctttacctgatgccggtggtgtatcacggccgtcaaggaaacaatgaacatatactttctcgattccctgtctcttggcgagctcaagaattccataaatatgagtaatatgactatgaactcctccgtcagatacaagtcccatcaggtgaagtgcagaatcattcttctttacattctcacaagctgcaagaagagctttgttctcaaagaattctccgtcttcgatagactttgtaatctttgtaagttcctgataaatgatacgtccggcacccatattcatatgtcctacttctgagttacccatctgtccatccggaagacctacagaaagtccgcttgcatttccttttacaaacggatactctgccatcagtttatccataacaggagtattcgcaagtgctactgcattaccctctgtcttatctcttaatccatatccatctaaaatcatcaatacggttggttttttgctcatctcaatatctcctttgcattaagattgtctattttttaactctacgctttattgtactagttttagcacaattttgcaagtcagagctctggtcaaatatatccgaaaataagcagattttcgcctgaattcatgtaaaaatcactacattaaaaatcttataatgtcggaagcaattctttcatcagctttacaccatgaacgatcgcctgtttctcaaatgtaggataatccacctgtgcacttccatctgccttatctgagattgcacgaatgatcacacatggaacatgattcaaatatgcaccgtgagcaattgctgctccttccatctcagcacatttcgcaccaaaattattaacaatacgttcttttacttctttttcagaaataaactggtctccgcttgcaactcttcctgtaaatgtacgaatatctgaattcgcctttttatttgcttccactgcttttctcacaagttctttatctgccggaaatgcaaatacatccatacgcggcacctgtccaacaggatctcccaatgcactgacatccatatcatgctctactgcatctgtagatacaacaatatctccgatattgatctctgcatccagagaaccggctacacctgtattgatcagctgatccacctgataaaagtctataaggatctgtgtacagattccagcgttcactttaccgattccgctctgtacaacaactgcttcttttccataaagctgacctttataaaatttcatggatgccttttcctgcatctcgcattctgtcatatcctcgatcagctcacggacttcttcttccatcgctccgataattcctaccatagcttcttaatctcctatcttttatattcccttttctaattgctttatttttcttcattaagctgttacattattttatcaatctcctctatgatacactcaaatgattttcaaagtcaagaaaaaaggccatcctgtcagaattgctatctatatcgctactgtctgcactacctgtgcccggcaatataaatatctttctgaccagatgacctttcttaattatctgttataatgaaacagccttagatcttattatttgtagttaacgatctttccgaagtcagccttaagggaagctccacctacaagacctccatcgatgtcagcctgtgcaaaaagctcaggagctgtagctgcgtttacagatccgccgtactggatacggattgcttctgctgtagcttcatcatatacttctgcgatgcaagcacgaattcctgcacaaacttcttcagcctgctctgttgtagctgtctttcctgttccgattgcccagattggctcgtaagcgataactgctgtcttagcctgatctgctgtaacaccctggaatccaaccttaacctgctgacggatgaagtccattgttacgccctgctctctctgctcaagagtttctccacagcacatgattggtgtaataccatgctcaaatgctttcaggattttcttatttacatcttcgtttgtctcaccgaagtactctcttctctcagaatgtccgagaactacatatttaacacctgcatctacaagcatgttcggggaaatctcacctgtgtaagctccgctctcctcgaagtacatgttctcagctccaacctggatgtttgttccttttgcagcctctacaactggtacgatatcgatagccggtacgcagaatacgacatctacgtcttcgttagctacgagtggttttaactcttctacaagtgctactgcctcacttggagttttgttcattttccagtttcctgcaataattttctttcttgccattgttcttatctccttgaattttatattcagaacccgtgtgaaatgtaacaacacgggtttcttctaatctgtaattacagattcttattatttatcgttagctgccgctactcccggaagttcttttccttcgaggaattcaagagaagctccaccacctgtagagatatgtgtcatcttatcaccatatccaagctggttaacagctgctgcagaatctccaccaccgatgattgttacagcatctgtgttggcaagtgcttctgctactgcctttgttccttcagcgaatttcggcatctcgaagcatcccattggtccgttccatacaactgtcttcgcagatttaacagcatcagcgaacatctcagctgtcttaggtccgatatcaagacccatccatccgtccgggatctcgttctgagctacaacttttgtatttgcatcgttagagaaagcatctgctgcaacagcatctactggaagaagaagtttaacacctttctcctctgctttcttaaccatgtcaagtgcatactgtaagtaatcttcctcaagaagggaatttcctacattaccgccctgagcttttgtaaatgtatagcacattccgccaccaatgatcagtgtgtcaactttgtcaagaaggttgttgattacagaaatcttgctggaaactttggatccaccaaggatagcaacaaatggtctctccggattctctactgcatttccaaggaaatcgatttctttctgcattaagtatccaacaacagctgtgtcaacgaactgtgtaacacctacgttagagcagtgtgctctgtgggctgttccgaatgcatcgtttacaaatacatcacaaagagatgcaagatctttgctgaatgcttcaccattctttgtctcttctgctctgtaacgtgtattttcaagaaggataacatctccatctttcatagcttcaacagctgcttttgcgttcggtcctacaacttccggatcagctgcaaattttacttcctgtccaagaagctcagaaagtcttactgctactggtgcaagtgaaagctccggctttggctctcccttcggttttccaaggtgggaacaaaggattacttttcctccatcagcgatcagcttcttgattgtaggaagagctgccacgatacggttctcatctgtgatctttccatcctgaagcggtacgttgaagtcacatcttacaagaactctttttccttttacattgatatcatctacggattttttattaagtgctgccatttttcatagcctcctgtatttctatttcctgtcactttcacgtgcaggatctgttctgcacaaagaaaatggagtccggtcctacaataagaccggaccccattgtgagtcaataattcagataaatctctgagattctaatttctcaaaaagaattaagcctcaagaagttttccaaagtatttgattgttcttaccatctggcttgtgtaagagttctcgttgtcataccatgaaacaacctgaacctctgttgtaccatcgccaactggaagagccattgtctgagtagcatcaaacagtgaaccatatctcattcctacgatatcgctggatacgatctgatctgtgttgtatccgaaggactcgttggaagcagccttcatagcctcgttgatctgatcaactgtaacttctccgtcaactactgctgtaaggattgttgtagaacctgttggtgtaggaacacgctgagcagatccgataagttttccgttcagttctgggataacaagaccgattgctttagcagcacctgtgctgtttggtacgatgttaactgcagctgcacgagatcttctaagatcaccttttctctgcggtccatcaagtgtcatctgatctcctgtgtaagcgtggattgtacacatgataccggacttgattgctgcaaggtcgttaagagcttttgccatcggagccaggcagtttgttgtacaagaagctgcggagatgatgttctcatcttttgaaagtgtctcgtggtttacattgtaaacgattgtcggaaggtcatttccagctggagcagaaataactactttcttagcacctgcatcgatgtgagcctgagcttttgctttggatgtgtagaatcctgtacactccagaacaacgtcaacaccgatttctccccaaggaagctcagctgcgttagcttttgcgtagatcttgatctcttttccgtcaactgtgatggaatcctctcctgcttctactgtgtctgcaagagcgtatgttccctgagttgagtcatattttaataagtgagcaagcatcttaggagatgtaaggtcgttgattgctactacctcatatccttctgctccgaacatctgtctgaaagcaagacgtccgatacgtccaaaaccattaatcgctacttttactgccatgattaattcctcctaaaaagtttaaaaaatttatgactgtatctccagccatggcgatgaatttaacaaagcgataattgttaaatattcatcaactagattcattgtactaaaacaggaacaaaaattcaacccttaaatccatataattcgatttttatggaacaattctcttaaatatcggtttccgccccttaaattctgcataataactaaaaccacagcttataagtatctcgccagccttgtcaaagtcaaaagcgacatgttccggacggtgtgcatctgcaccaattgtgacaatttcaccaccaagctccttgtatcttctgataacatccggatgtggattcgggaatccgagaccatatttcattcctgccatattcatctcaagtccttttccatgactgatcagatgctttagtatctcatcgatctcgtctgcatattttctataagaatatccttctgcctgatgtgcgccataacggacaacatagtccaaatgtcccaaactatcaaaggaatctatttttttcagattttcaactgtcacctcaaatgcttcatgataagcctcttcatcacttcgtccttcaaaaaatccacgataatacggatcctgtccatggataagatgtactgaaccgattacaaaatcaaacggatatttttctgtcagttctctataatattcccccagatgcggctgaagtccgatctctacaccgattcggacttccagtttcttctgatattcttcttttaactgtgtcagcctctgaaaatagtttcccagatcaaacagaaatgcacccgccggaaaatccggtgtcttcggaaaatctttatcaagatgatctgtaatacagactgcttccattcccctttctattgctgcatcaagcatagaatgtacggatgcatcactatcctcagaaaaccttgtatgcatgtgggcatcacatcttatcataatattgtgccgcctcctaatacatattctccatcatacagaacaactgcctgtcccggtgtcactgcacggattggttcatcgaatgtacaggtaatctcatcttctcctgtcttctccacggtacaccaggctcctttgtggttataacgaatctttgcaaacacacgcatcggttctgtaagatcttccacgctcataaaattcaactcattggcacgcagtgtatgcgtcaatgattcttcatacgttccgattacaacttcatctgtctccggacgtatctccagtacaaatgcaggataccctaatgcaagtccaagtcctttacgctgtcctactgtataatgaatgattcctttgtgttttccaaggatcttcccatccggtgttacgaaatttccctgacgaatcggagcatctgcgttttcttcaataaaagatgcatagtctccatccggaacaaaacagatatcctgactatccggtttatttgccacctgcagtccgattttttctgccatctcacggatctgatcttttgaataatttccaaccggcatcaatgtatgttccagctgttcctgtgtcagattataaagtgcataagtctggtcttttgcaagcgttgcagatctgcggattgcatgtcttccgttcgggagcttatcaatccttgcataatgtcctgttgcaatataatctgctccaattgaaagacttctctgtaaaagagcttcccatttcacatagcggttacaggcaatacatggatttggtgttcttccgttgagatactcttctgtaaagtaatcaataacatttttctgaaattcctgtttaaagttcattacataataaggaattcctatagacgccgcaacccgtcttgcatcatccactgcactgagcccgcagcagcctccattctcttcctgaacgacgttgtcttcatcctgccagatctgcatcgtcacaccgatcacatcatagccctgctcttttaaaagccaggctgccacagaggagtcaactcctccggacatacctgcaacaactttgcctttgctcattaatattcctcttcctctgcttcttcaccttcgtgaatatctgactttggtttcttcaggccttcaatcttaatcccatgtttctctgcataatcccagagtgctgcatggattgcctcttctgcaagcagagagcagtgaacttttaccggcggaagtccgtcaagagcttccataacggctttgtttgttacttccattgcttcctgaatgcttttccctttaaccatctctgttgccatactggaagttgcaacagctgctccacatccgaatgttttgaatttcacatcgcggatgatctggttgtcatcaatgtcaagatagattctcatgatatctccacattttgcatttccaactgttcctacaccgctggcgttctcaatctctcctacatttcttggatgctgaaaatgatccattactttctctgtatacataatgtaattcctccattttgtttatctttttatccaaaaattattctgtattttccttttaaatcattctgacttatgcattcttctgctgcttttttataaaatcttcgtagagcggtgacatgctgcgcagatgggcaacaatctctttaagctgatctactgtatagtcgatatcttcttttgttgtatcagctccaagtgtcatacgaagggaaccatgtgcgatctcatgcggcagtccgattgcaagaaggacatgggatggatccagagaacctgatgtgcaggcggaaccactggaagcacagattcctttcatatccagcatgatcaacaaagattctccttcaacaaattggaagctgaagttaatgttattcggaacacgtttcacacgatctccatttaatctacaatatggaatctcattctcaattcttgcaattgcataatcacgaagttctgtctcatgtttcattctctgttccatggaagccatagcaagctctacagcttttccgtatcctacaatacccggaacattctctgtacctgcacggcgttttctctcctgggctccgccgtgaataaatgaacggatcttcactccttttctgatataaaggaatccgattcctttcggtccgttcagtttatgtccgctggaactgagcatatcgatattcatctcatctacattgatcggtacctgaccaaacgcctggacagcatctgtatggaaaagtactccatgtttatgtgcaatctctccgatttctttgattggctgaatacttccgatctcattgtttgcaaacattacgctgaccagaattgtatccggacggatcgctgcttcaacagcttccggactgacaataccattttcatctacatccagataagtcacttcatatcctctcttctggagatattctcctgtatgaaggattgcatgatgttcaatctttgttgtaatgatatgttttccctttgattcataagcctcagctgtagctttcagcgcccagttatcagattcagaaccaccagctgtgaaataaatctcctctgtcttcgcaccaagtgcttttgctatgatttctctctgttttgtgatcacttctttattcgcagccgcaaaaccataaacactggatgggttgccaaaatgctctgtaaaatatgggagcatcgcatccacaacttccggtgctgtctttgttgttgctgcattatcaagataaattaattttcccattacctgttacctcacttttattttatctgctttgttttcttaccgttcacaaataattgtagacaatgattcttttcagtttttacactttgtataatccagatgattgtctgtatgtccaagacatttactttctgtcaccagttggttcagccagatttcatctactgtctggttaatactatcattgattcgtttccacacatactttgttacacagctgtctgcacctttgcattctccttccggatcaagtccggcgcattctactggttcaagatttccttccagtgcacgaagcacatctcctacagaaatatcttttgcttcctttgctaagacatatccaccatttgcacctcggatactcttgacaagtcctgcttttttcagcttcgacatcaattgttccagatatcgttctgaaatatcctgacgtcttgcaatacttgtgatggaaaccggagaatcttcactgtattgggccagatcgatcaaggcacgcaatccgtatttcccctttgttgacagtttcacatcttcaccttcttttttttcttttcctagtattatgctagggtttccttttgtaggatatcaccagtcttacgttctgtcaaggatgtttcttgaatatgttgtttaaaaataagttcatttctggttactgtccgcgttgcacgtggcagcaatcattttgacatgagggtattatgtttagaaaaaaacattctttgattaaaggaacactgattctcacatctgccggtcttgtaagccgcgttctcggattctttttccgtattttcttaagccatacctttggagaagaacaggtcggactttatcagttaattttccctttctacgcactctgcctgtctttgagtacttcaggtcttgaaactgccatttccagaagtgtctctcgctttcactcccttggccgaacgcaggacggaaagttgattttccagacaggcctgattctttctgttctgatttctctgatttgtacttttctggtacagaagaattccgtttttctttcaaatcgttttcttggagatccaagatgtgcaacactattatatctgatcgttcttgcacttccggcggcttctgtccacagttgtatctgtggttatcactatggtctgcaaagaacctctgtcccggctatttcacagttaatcgaacaatttgttcgaatttcttctgttttggttttatattttatttttatacgcagtggagttcaccctgagattccattggctgtatcaggtattattttcggagaacttgcagcagcaggctactcgcttttttcactgaagaagaggggttttgatgccgattctccatatattctttctatctcaaaatcttgttctgaattgctacgcctctctgttccattgacagttaatcgcacagcaattacattcttgcagggaattgaagcagcttcaatccctgtctgccttgagcttgcatctcacagtgcttccgaagctctcagtatttatggagtactgaccggaatggcattaccatgtatcctttttcccagtgcactcacaaactcagtcagcctgcttttaatccctgctgtcgcacaaaagcaggctgaaagctcttcaaaagagacatttctccttataaaaaaggctgccggaggatgtttctcccttggtcttctgtgttctgtcttctttcttcttaccgggtcttttctcggaaacttcctgtttcacagtactttagccggtaatttcatcgtaacacttgcctggatctgccctttcctgtacacaagttccgctcttctcagtgcaatcaacggactgggacttacaaccctgacactgatgatcaatcttcttggattatccatccgcattcttagtgtatatttcggaatcccgcactatggaatcacaggatacctatggggacttttcatcagtcaatcaactgtctgcctcgttgcattactcacactttcccacgaaatcaaaaaagaatatttacaatctgttgaatcagccacggattaagacaggattctgaaaaaatcccaattaaaaacaaaccgcatacaaagaacgttttttgtctgttccactgattctgtggatagttccaacaaaagcgcaaaagcacaagaactgccggaacataaaaaaggaactgtggaaatagtcctgccacacaaagaatacttcccttcattcctaattctgccactgcctctgacagtaaaattcctcctgacatcccagtccacagaagaaaaaacgctgccacaatttttctaatccggattcccatcgccaaaaacagcaccaggaaaaaaattccccgtacctgaatcaaataccaaatgtactgttgaaaagatatcttctcattctttaatctcataagataaacttctgtaaaagttccgatcaggctcagctgttctccccatatataattgacaatcaagattcctgtcaaaaagcctgtaaaaaacagagccagaaagtaatgacctgtacgaaatgccttcaccagtattcctcccaccctataaaatgttctgcggatatatttttatcctcaatcttccacaccattatatgagtgtctggtttttctcatgcggcagcgatgctacttattgtcggcattcaatcattttccatactttacagcataagccatcaaagaagaaactgtcttcgcatcttcaatctcacctgaaaagatcttttccttcaattcttctattgtataagcgccaagttcaataaattcatcttcatccaaatgctgttttgacggtatcagatcatgtgccacataaacttcaatccgttcgttacaaaatgctactgttgtccgtaaagtgatcagccactcaagattctcgctgcgataccctgtctcttcctctaattcgcgagacgcacactctataccaggttctcccacttcatcaagtgctcctgccggaatctccaatgtatatcgatccagcgcatttctatactgtctcaccatcaaaatcttaccatctgctgtaaccggaactaccgctgctgctcctttatgacctataaaatcccatactacggtatgatccccgtccacttctatcgtgtcctgataaaaatcaagaatctttcctttaaatttcaattctctgttaattcttttaatcttctcgctcattccgttctcccttcttttaccttacatcaccgtatgcattctatatcaaagactttgttactgttcacacgatgtgcgaccagcaacgcatctcgccattttaaatcgcctttggcgatggggcgagatgcattcaagtcaaaacacgcatcctccatgtcaatcagcggagtgattgacacgggagtgaacagtaacaagaattttacgcttacctgtaatagctttctcagtaaactaaaagcccctgtctttcgacaagggccaactttcatcttctgttatgattctcttattttgcgtaatctgttgctcgtgactcacgaataacatttactttaatctgtccaggatattctaattcaaactcaatctgttttgcaatatcccttgctaaaagcaccatatcatcgtcagatacctgctccggaactaccataacacgaatctctctacctgcctgaatggcaaaagacttatctacacctttaaactggttggtaatatcttctaactgtttcaatctgtttgtatatgtctcgatggtttctcttcttgctcccggtcttgcagctgaaatagtatccgctgcctgaacaacacaagcaatcagactctgcggctccacatcaccatgatgtgcctccacagcattaataatggttgctgattctttgtattttctacaaagatctgaaccaatctgaatatgtgatccttctacatcatgatcaattgatttaccaatatcatgaagaagtcctgcacgttttgcaagtctgacatccagtccgatttctcctgcaatgagacctgataactgagctacttcgattgaatgcttcaatgcattctgtccatagcttgttctgaacttcatacgtccaagaagacggatcaactccggatgaattcctgtaactccaacgtcaagagctgcagcttctccttcctcgcggatcattgtatccacttctttctgagctttttcaaccatctcctcaattcttgccggatgaatacgtccatccacgatcaaacgctcaagtgcaattcttgcaacttctcggcggattgggtcaaaccctgataatacaaccgcttccggagtatcatcaatgatcagttccacaccggttaatgtttccagtgttctgatatttcttccttctctaccgatgattcttcctttcatctcatcacttggaagctgaactacagaaattgtagtctctgcaacatgatctgctgcacatctctgaattgcattcacaacatactcttttgctttcttgtcagcctcttcctttgcctgagtttccagttctctgaccatcttggctgtgtcatgcttgacgtcatcttcaacagtttttaacagatattcttttgcctgttcggaggtaagtcctgagattcgttccagttcctgcacacgtttctggctaagttcttctactttggcttcacgctggcgaagatgttcttccttcgctgtcagtttgctctcacgatgttccagtacatctgaccgtttgtcgaccgattcttccttcgcgagtacacgcttctcataacgctgtaactccgctcttctttctttcgtctctttctcaagttcattctttgtcctgatggactcttcctttacttccaaaagagattccttcttcgtcgtctctgcagtctttacagcatcgtcaatgatttctcttgcttttgcttctgcattcccaatcttgctttccgcattctttctcagattggaaactgtaacaaagtgagtaatgattccgactatcaacgcgagggccacggcaacgcctataaataaacctagacttatctgcacaggagcacctccttattcgattttcattgtacatattactcaaatacaacacttaaattttatactgtttcaacaacaatgtcaagcattgtaattattattttgtatcacatgacataacccggttactgttcacacgatgtgcgaccagcaacgcatctcgccattttaaatcgcctttggcgatggggcgagatgcattcaagtcaaaacacgcatcctccgtgtcaatcagcggagtgattgacacgggagtgtacagttactctgtttatcataatctgatataacatggcggatcacctcataacgaaatccttttcgcgcaagatatcctaatatcttttgatattcctgctcttccattctttccggatcaaccttcttttttcgcagtatccttcggattgcctcttcctcagaatcttcactatagcactgttcaaaagccaggcagatcaaatcatcagaaactcccttctgcgacagcagtgccttgatttcccgtttgcttttagtatctttgcggctcataacaaaattttccgcatatcttgcatcatccagatatccaaaagatctcacatattcaattgctccgctgattgcattctccggatattgtcccgccttcagtttttcccttaatgcagactcagtacgatccatatcctccagcaaatgcattgctctcttctttgcgcgtttcaacagtacctcattctgaatcttttcataattttcctgcgcgagatcttctccctgctttataccaaaacgcttcaactcacttttataaagcacaaatgcaaatgttccatccagatatactttaaacttcgtctttgtctgctcttctatcccagtaacaatcattctttcttttctgcctcatcagccactttagaagccggtgtcagcttcagatcacttgatgcccctgccttcttctcagcatctggaagctcattctctgcttcttctgatccagataatgcataatgtgctctcaccttctgatccagtgtctccatcacttccggatgtgattccagatatgcctttgcattctctcttccctggccaatcttctctccctcatatgcataccacgcaccgctcttcttcacaagatcaatattggttgcgagatcaagaatatctcctgcacgggaaataccttttccaaacataatatcaaattccgcttctttgaacggcggagcaatcttattcttcacaatacggattcttgtacggtttcctaccatctctccactttgctttaaagtctcgattcttctgacatccatacgcacagatgcatagaatttcagcgcacgtcctcctgtcgttgtctctggatttccaaacattactccaactttctcacgcagctggttaataaagatcacaatacagtttgacttgctgataaccggtgtcagttttctcaatgcctgtgacatcaatcttgcctgcaaaccaacatgactgtctcccatatccccttcgatctcctgctttggaacaagtgcagctacagagtcaatgacaataatatcaatcgcccctgaacgtaccattgtctctgcaatctcaagggcctgatctccactgtcaggctgtgaaatatagagttcatcgatatctactccgatattctttgcgtatacaggatccagtgcatgctctgcatcgataaatccggcaattccgcctctcttctgaacctcagaaatcatatgaagtgcgacagttgtcttaccacttgattcaggaccataaacctcaatcacacgtccctttggcacaccgccaagtccaagtgccagatcaaggctcagacatccggtaggaactgtctctacagctacatgcgcccctgattctcccagccgcatcactgcacccttaccaaaatctttctccagctttgcgatcgctgcatccagtgctttcttcttctcttcgttattcgccagctttgtaacgctctctttgcctgccataattttctccttctctatctctcttagtgtataaaacccattctctctttttcgaacagttgttcgtctatgaatagattttattatacttctttcaaaatgtcaacaataattcttccccttaattttgttgcaataatacgatataccatggaatcctcttcctgaaacagaagaattgaagttcatgtgaatcattgccggcttaaggatctgccggccagacaactaaagaatagcataaggaaaggcagaatacaagtaccacagcacttacattctgccttttatactacactgctttccagtgtttcacttcttctttgtaaaagataattccttcctggataattttgaatccactgccttcaagttccgcaatcgtaacagaacaatttggcggtacttcatttttccagaaatgttctactgaaagactgcctctcatcctgttcagcattgctgtcatcgcagcaccatgagtagaaatcaaaagattcttatccttcaacttcttactctcttcaagactctttaaaaactctccggttctttcataaagttgttctacactttcagcatcttccggcggaatataatttcccgtatcctgaaagaatttctggaatgcaagattctcttttttcgtcttatctacacaagacattccctcatacgagccaaaagaaatttcctggattctctgatcttcataaagcggaatgttgcgtccttcaagaagaatctctgccgtttcttttgcacgctgtaagggacttgtataagccagatcaatctggtattgtctcatcccataagaagtttcccgggcaagatgacgcccatattcatttaagggaatatcctttcgtccctgtaccagttttttcttgttccaatccgtctctccatgacgcacaatatatagcctcactgctgcctacactccctcttcttatctttttaatacttctctcctgatatatctataagtagtttcctcgccttcttccgcaagcatatgaagcagtttttctaataattctcttgtatctttatgcatcagctcatctgcacgtccgttttcataataagcaagcggtgcatcagaggtatatgcatccccgagatacactttacttgctgcaatgcggtcaagaaacatctctactacatatctcaccggcatcttcattcccgccagaaggttcggtccttccagactataatcaatccagtattcataatggtgtttgttcctgcctttgtggtggagccatgcggaagaataccccttttcttcccgttcggcattattagggcttcttgtcccctgatagtatctgcatcccacacggaattctgtccaactgtattttgacatatcatggagcagtccctgtttgtacaacccaacacgaaaacactctttcaataccagttttttgtgttttgttatggtacaaaaatgtgcaaatgccttcatacttttccctctctggccggctgttcttctttacaaagttcttctgctccctgccgtttttctattttatttacattctgcgtcttagctgtatgaatcggtttcttttctgaacgactcttcttttcctctatcctacgtccaagcagaattgctacgctacgttcttccagtaatacatctttctgattttccagcttttttgcttcacaaagcacgccatcttttgtagtcataacaagataccattctacgttctttccaatcgacggtattgcgaagtgatgcggcagccaatgcatattatatgctgtaaaacaagggaactccccttctttcgttcctgaatacaagacacctaactgacggctggaaacttctgcttttacctgccatgcattttctccatggtaggatacgtccggtatgccacatctcgtggtatccattccggatagtgctgtactctggtggagacaacgatgttcttttctcagcccgatcagtttctttgtatactgaaacagccagtcatctttcttcaactgtgtccagttcacccatcctgtctcgttatcctgacaatatgcattgttatttcctctctgcgaattacagaattcatctcctgcaaggaggcatggagttccctgagccgtcaacaggagttctaatgcattcttcacttgattctttctaagattgacaactgcgcgttttctgctcggtccttcagctccgcaattccaactgtaattataatctggtccatccaggttcttctcaccgttttcttcattatgtttgcaatcataagacactaaatcccataacgtaaatcctgtctgtgttgtaatataattgcattttccattttccgatgaacgatttttcaatgcccagatgacatcattgaccatattctcgtcaccttttaagaagcgacgcatcacattctggaaaccatcatctttctgcatcagcttgatatctttcaaaaacggatcttctatcagctgctcccacggtacgttataaggattcagaacaaatccatccacatgatactccagcatataaaagcgtagacattccgttacataatttgctgatattcccggaacaaatggcatctccagtacaacttctatgccctgactatgacatgcgcgcaccatatctttcaactcacgaactgcacttttcccatatgcgtaggcttttttaggggcaaaataaaaacctttaccatatccccaatagttcacttttgtttttccgcactcttcaaattcatagaccggcatacactgaatctggttgactccaagttcttttaaataatccagtttttcaacaaccccctggaatgttcccttatgcaccactttcgaagaagaatgttttgtaaatccacgcacatgcaaaccataagccactacatcttcccatggaagatgtaggcgctgatcctcctgccagtcatagtcctccattgaaacaattttcccacgaatctgatgttcctgaagtttccgttctacaccaaatttctcttttcctgcaagttcttttgcatatggatccacacatactttcccatcaatcagaaaattgtattcatatcgatctgctttcagaccttcaacagataagaaacgtacttctccaacgccttcttcctccggcatatcaaactgatattccggaacttcttttcctctcttatacagtaaaagttcacatgtcttcccttttgctacctgaacggcaaaatttatatttttgcctttgatatccactccaaatggctgcggactcccctttatcttcctcatagttaacccctttcttgagcaatcaataaattactgccatccatccgttccgtacatttcaacattatcacgatttataaagaaagtttcctcataattatccttctcgtaatccttgtctgccagtaatgctgtcgccacctttactgctgtctttcccatattgatcggggactgtgctccaatcccggtcattcctccagtgccattcaccagtgctgtttttgtcgccggggaaccatccacactatacacgcagatattcgttctctgcgcttctgtgatcgctgccatcacctgttctgccataggatcactaccacacattacagcatcaatctcactattttcgctcagaacctgtgtcatctcgtccttcacattactgctgtctcccaatgcttcaattctctttaccacttcaaacccactgtttgttatagcctcttcaaatccggtaattctctcattcactgagttcaccccagggttttccacaatcacaattttgccaccatctggtttctggaccagaagatcctgcccgcatacatatcccgcattctcattatctgaccctacaaatgcagatacaaggcttgtctcttttacttctgtatcaagattgatcaccggaatatctgcctcttttaaggcttcaagtgcgggagtgattttctcccaatctaccggacaaagaaatactgcctgtaccccttcgttgatcaactcccgaatctgttcattctgcaaatcagcatctgatgccggatcacgaaccatcagacggtcaccttgagcctctaatgctgtctggacagaatttttcaatgtgtcataaaaaggattcgacatatcaatcccactaaatccaaacagtctgccactttcccctgtattatcatttttcttatcattctcttctactactgcattatcttccggtgttccaacatttttctttccacatccaagcagtgctgccgctatacacaaaactgccactgtacacagtatccatcttttcttcatattgtctattatcctttcacttctatcagtaacacttttattctaccttgtttaacccgaaagtcaatcttatcttgcttttttctcccctttttgttaccatcaagatagctgatcattctcgttttgagcacctggctggtcaatacggaatgaaatacaacacagattcaaaggagaagattatgaacgaaaacgaatccctcacagtcactttgacactggagaataatgaggaacttgaatgcgctgttctcaatatttttgaagcagatgaaaaggagtatatcgcacttcttccactggatgaaaacggtgataacacagacggtcagatctatctgtatcgtttcattgataacggagaagaggaagaacctggacttgagaacatcgaagaagatgaagagttcgaccgtgtttccgctatattcaacgaatggctggatacacaggatttcggcgatatcgatcttgatgcattagatgacctggaggactaagtcttgaggatgtcagcaaagtgactgacatccggtcagcttttcaatagttcgtctacaaaacgggaaggagtaacttctttcccgttttttattttcacataacagatcttcagaaaatcttttgcccttgtcattgccacatagaataatcttctctcttcttcgatctccttgtctgtctttgccttctgatacggaatccttccttcattcgccgcaatcagaaatacctgcttgaattccagtcctttagaagcatgtatcgtcatcagccggacacccggacgtggtctgtttctttccttttccttcactttcaaagtctccgtatattcttctacatgtgcaaaccattcttcaacacttgaaaatgctttcgccgcctcttcgatctctgccagtacttcattcagatcagatctgtttatctgatgtgtaaatgcatactctttcagaaaatcgtcataaccaatcctttttctgatatactggattgccgcatatggagccatcttcataagcatcttaacatcccactcaaactgatcaatccggtcgatcatccagtctttatcacaatagaacttccgcatgtcttcaaaagaaaccttcgctcctgctacactgtctcttccaagatatcgctttggtcggttcattatctgtaaaaaatcttgtctgtgccgagctcctgttgccagtcggaaatatgccatgatgtcctttgcgataaagtgttcatatatatttggaagatgttctttcatctgaaacgggatcttccgctccaccattgcttctaccactgctcgcgcatctgtatgaaccctgaatagaatcgcaatctcctcttcttttatgccattctccttacatttctgtatctcttcaagaacatattctgcctcttccaccggatctttcacttcctgaatatgaaggcaggaaccgccttcacggtttgcttccaattttttactgtatctctccacattattttcaatcagtttcaaagaattctgtacgatatttgctgtcgaacggtaattcattcccaacagaatttgttttgcatcagggaaatcttttccaaatccaagcatcaattctgaatcagctccacgaaatccgtagattgcctgatcgtcatcccctactacgaacaaattattttccggctgggccagcatacggatcacatcatactgaattcgattaatatcctgaaattcatcaatcaaaacgtatctgaatttcttctgccactgtgcaagtacatctggtcttgattggaacaattcataacaaagtaccagcatatcatcaaaatcaatctttttcagttcttttctatgctgttcataattacggtaaatattgcgaaaagcatccgcactacacttttctgatacaaattcttccagcggaatccgattattcttcacttttccaatttctgccgcaatatcctgaataaaatcttcttcatcaaagatctccattctttccttgttaatcacgccacgcaaaatctgatatttttctgtctccgaaagaatattttcctgattcatccggtaagcccatttcaggattccataatagattccatgaaatgtacccactgtaaccggaagatctcttttgcccataaccaaacagaggcgggatttcatctccgccgctgcaaatcttgtaaaagtaacgaccagaatttcttctggtcttactttctgtttctctataaggtattttactctgtttacaatcgtaagcgtcttccccgatcccgggcctgccagtacaagacatgggccgtctgtgtgctgaatcgcctgcgcctgtgcttcattaaatcccattgtacctcttttcgctgtccttactgaagtttctcgattccaagacggattcttctaagagactcctcttttccgagtacttccatcagttctgttgctccacccggagtgctctgctttccggaaactgctgtacgaagcggccacattacataacctactttgtatcctttttctgttgcaaatgctttcaatgtctcaaacaatgcatcattactaaagtcctcctgcgcctcgagaaccggaagaacctcgttcagaagtgcgagtgacttctcaggatctgttttcatcttcttgtgtgtatacagtgcaatatcgtaatctggaagttcttcaaagaaatcaacctgctctttgatctccggaagaatctcaattcttgtcttcacaagtgttgcaatcttcttcagatcatagtcctttgttactgcctctttcagataaggctccgcaagtgcatagaacttatcaaaatccattgccttgagatattctccgttcatccatttcaatttcactgtatcaaatacagccggagatttactcatatgatgataatcaaatgcctcaacaagctcttccaatgagaagatctctctgttatctgtcgggcaccatccgagcagtgcaacataattcacaactgcctctgaaacatatccctgctcgatcagatcttcataagaagaatgtccacatctcttgctcaatttcttatgattctcatctgtgatcagtggacagtgtacataaactggtacttcccagccaaacgcctcataaaggcggttatacttcggtgctgaagataagtactcatttccacgaacaacatgtgaaatctccatcagatgatcgtcaattacatttgcaaaattatatgtcgggaatccatcagatttaatcaagatcatatcgtcaagctctgcattcggaactgtgatatctccgtagatctcatcatggaatgttgtctcaccttcattcggtacattcagacggataacccatggcttacctgctgccagattcgcctctacttcttccttgctcagacttaagcagtgcttatcataaacagaaatctctactccaccttcggaaacctgtgtctttaaagactcaagacgctctttgtcacagaaacagtaataagcatctccctgctctacaagctgctttgcatatttaagataaagtcctgatgcattacgctcactctgtacatacggtccatatccgccatctttatccggtccctcatcatggatgagacctgttttctccattgttctgtaaatgatatcaagtgcaccttccacaaaacgttcctggtctgtatcctctacacgaaggaggaaatctcccccttcatgctttgcgatcagatacgcgtatagtgctgttcttaagttacccacatgcattcttcctgtcgggcttggtgcaaatcttgttcttactttcttactcattctatcttctccaattcttgtttgttattgttcaatctcgtcatattatagcgcaagtccccagattcttcaacaaacaaaatcaatgtttttcttttactccaaaagtttcaccgtttcaggaatacttcccgcctgttcaagtgtacaggatcttgcatcaatacattccagatttgttccatcaaatgcactttccgcaaaacttttcacactttccggcacctgaaaggttcctgtccatgctgccggaaatgcaagaagaactgtgccatctgccgtgtaaagtacaccatctaccgtaacataggctggatttgctgcatctgcttctatccatcccagattactcagccccacaaacgctcctggctgaatatttattatattagcaggaatttcaatctcttctacagcagaaccaagacccgacagtgctcctctcgcaattccggaacatccttcttcaggaaagtacaatactccatcctttatcacttctttgtctcctgaaagtccacagatcataccttccgcattaataagatatccggtatctgtatttcccactgctatcgacccttcttcatcctcattttcattttttacattttccattgaatcaggatttgtaattaccggttcacttgcaacatttatagttgtatctcttttcacgtctggtttttctgccacaatctcttctactactggttcttccaccgcaatttcttctaccataggttcttccactaaaatttctgccggaacagctgctacctggataacatctgcttgattaacatctgtccggatagtttctgctgataagaaagaatgctcatccattttttccggttcttttatctgttttgttattgttactttttccggcagatcatttcctgacacatttatatcctctgttgtcgcacagacctctatttcggaaatcagattcttttccaaatataatgaaacaatttcctgtgcagacatcagaatcagcgcaccacttaataaagtcactcccactctgacatatggttttctcgccgcttcctgatgccattcattccaattcagtcctatatccatgttctcttattcctttctctttcccccacattttaatatacgaaataattttagtttatcaaagaaaaagggatgctgcaaccaaatgcaacatccctttgatttttccgctttgtcctgatagattccaaggattctatacgttaatttcagccttcacgccaaggatctctttattcttttcaagcagtggacggatcacattcttaagataagcatctacctgctcacttgcacgtccaacatatttctccggtttcattgtcttctgaagatcctctaaagtcaggttgaatgccggatctgctgcgatcagttcaagaaggttattgtcaagtcccttctctttcacatttcttcctgcttccatagaaagctcacggattctttcgtgcagctcctgacggtctccaccggctttaacagcatccatcataatattctctgttgccatgaatggaagttcggacatcagacgcttctcgattactttcgggtatacaaccagtccgtctacaacgttcagacaaagatcaagtattccgtcgattgcaaggaatccttccggaacactcagacgcttgttagcggaatcatcaagtgttctctcaaaccactgtgttgcagatgtgattgccggattaagtgcatcgatcatcacatatcttgaaagggaagcaattctctcacttctcatcgggtttctcttataagccattgctgaagatccgatctgtgtcttctcaaatggttcttcaatttctttcaaatgctggagcagacggatatcattagagaatttgtgagcacttgcagcaattcctgccagtacattcagtactcttgtgtctacttttcttgaataagtctgtccggataccggataacatgccttaaatcccatcttctcagcgatcattggatcgattttgtcaattgtctcctgatctccgtcaaacagttcaaggaaacttgcctgtgttcctgttgttcctttagatccaagcagtttcaggcttccaagtacatattccagatcctcaagatccatttcaaactcctgcatccagagagttgctctctttccaacagttgtcggctgtgccggctggaaatgtgtaaaagcaagtgtaggctggttcttctgctcctctgcaaacttcgcaagctctgcaattacattcacaagctttgtgcgaaccagtttcagtgcttctgccataataataatatctgtattatctcctacataacaggatgtagctccaagatggatgattccttttgctttcggacactgaacaccatatgcataaacatgagacataacatcatgacgtacaaccttctcacgttcctttgccacctcaaagttaatatcatccgcatggctcttcatctcttcaatctgctcatccgtgatgttgagtccaagctccttctcagtctctgccagtgcgatccaaagtcttctccatgttctgaactttttgtccggtgagaagatatactgcatctcgcggcttgcataacgctctgaaagcgggcttacataacgatcattactcataattcttttctccttgtttcaatctttatcgtaactgttcatctattataacacataaactgagtcttcaaaatcaattttgttcaaatgcctgactgatatcctctttcggaacttccatcggatactttcctgtaaagcaggcatcgcaatacttaagatctccaaccatgtcttttagtttctcaatctccatgtatccaagagagtctgctccaatcagctgacggatctcctcctgtgtgtgagtatgtgcgatcagctgctcatttgacggaacatccgttccaaagaagcatggatgtaagaacggtggagaactgatacgtacatgtacctcttttgctccggcttttttcagcatcttaatgatatttgcacaagttgttccacgcacgatggaatcatctaccattacgattcgttttccctttacaacttccggaatcacattcagtttgatttttacactggaaacacgttcgctttgtttcggtttgataaatgttcttcccacatagctattcttgtgaaatgccattccatacggaattcctgactgctcagaatatcctttcgctgctaccagaccggagtccggaactcctacaacaagatcagcgtctaccggataagattccgcaagtgcttttcctgccagaattctggaatggtatacacctacaccatcgattgtactgtctgttcttgcaaaataaatatactcaaaaatacatcttgcctgtttttccgaatcgatcaccatactcgtatctgactggattccatattttcttgtaattgttacgatttctcccggaagaacatctcttacaaactcaccgtctacagctgcaattgcacagctctcagaagcaaggaaatatgtattgtcacgttttccgatgcacagtggcttgagtccaaatggatctcttgcaccaatcatttttctcgggctgctaacaacaagtgcgtatgcacccttgatcttctgcatcgcacgcttcactgcttcttctgctgtcggtgtatgaagacgctctctcgcaataagatatgcgattacttcagaatctattgttgtctggaaaatagcacctgtctggctgagttcttctctcagctcgattgcatttactaaatttccgttatgtgcaatcgcaagtgttccctttacatagtttataacaagtggcattgcattctctacacgtgttgcgcctgctgttgaatatcttacatggcccacaccaagatttcctttcagctctgaaaggccctcttcatcaaacacgtcatccacatggccaagtcctttttttgaaaggacgtttctcttcccataagtgtctgtcactgcaataccgcagctctcctgacctctatgctgcagagcaaacaagccataatagactgatgcagccacatcatgcccatccacatcataagcaccaaaaacaccgcattcttccccaagtcccgtcactgctttttcaaattcactcatgtcagtttatgctccttacctagttcctgctagtttttatcatgatttctgtatcatacaaaaccgattataatataaggcggagtgaaaatcaacattccctccgccttgtatttcttcctgctcattattttattcacgtccaatatattagtatttctaatatattcgtcgtttttattcttcgtatcttattaccgccttcattttttgtccagtatttacaaaatcactatccatttgtataacgagacaaaaattgacgggtacgctcttcttttggattctcaaacacttcctcaggagttccctgctcaagtatcttaccgtcatccataaacagaactttgtccgatacgtctcttgcaaatgccatctcatgcgttacgatgatcatcgtagtattctgatctgcaagtcctttgataactttcagtacttcacctgtaagctccggatcaagcgccgaagtcggctcgtcaaagcatagaatatccggactgagtgcaagtgcacgggcaattgccacacgctgacactgtcctccggaaagttgatgcggatagttattcatacgctctgaaagtcccatctgatctaagaggcgctttgcttctgcttcaatctctgcgtgtatctctttcttgcgcgccttataatcaggctgactttttgcaagtagttccttcgccagcattacattcccaagtgctgtatactgcgggaacagattaaaagactggaatacaagtccaaaatgtaatcttttcttacggatctcactttcctgttttgttacaggatttgcagcatcaaacaataattcatcatttacacggatcacacctttatccggtgtctccagaaaattcaggcagcgcagaagtgtcgtctttccacttcccgaggaaccgatcaaggaaagtacctgtccacgttccaacgaaaagctgatatctttcaatacttctgtccgtccaaatgttttattaatatgttctacttcaagtattgccatttatctcttcctccccatttaattaaaatattccagcttcttctcaagctttccaagaaggactgtcagaataccattgaagatcagataataaaaagctgtaaagaacatcggccagatcgcacctgagattccctgagaacctttcaggaacgcctgtcctgcccagataatctcctgcagtgcaatgattcgtgcaagagaagtatcttttacaagcgtaatgatctcatttgacatcggtggaacaattctcttcaccatctgaagcagcttaaccttaaagaagatctgatgctttgtcattccaagaacaagtccggcctccgcctgtccctgtgggataccctggattcctccgcggtaaattaccgagaaatagcatgcatagttaaagataaatgcaaccgaagctgcgagaaatcttccgctttcaccgccaccccagattgggtttcctaagaccagtcccgggaaataataaatgatcagcatctggatcataagcggtgtgcctcgcacgatccagacaatgatattcgtaatataactcaacggtttaaaatgtgacatcgatccaaatgcaataaccagtcctaacggaatagccccaagaagcgttgcaaaaaacagcttcagcgtctgtaagaatcccacattcagtgagtgaataacgattggaaattgttccataataagttccattatattaaagctccatcctaaatttatttttcgatcaatgcagcctgtactttataagtctcagcacatttcttcattgatccatcttccatactctttttaaagtaatcattcagagctgctgcaagatcagatcctttacggaatccaacaccatactcctcattgttcagacttattgtgtaagtaagatctgcataacctgttccttctccgatcatagctgctgccatcaaagcatcaattgcagctgcatctgagtttccggaagcaacctccatcagtgcatctgcctgtgatgaaacggctgtatactgtgcaccaattctttcaacctgatcttcccctgcacttcctgcttctactgcaaaagttaaatctttcacactttcctcatcctgatacttatctgctttgtcagccggtacaactacaacctgcgcgttattcatataagcatctgtgcattccatagaactcttcacttcatcaatcagtgtcataccattccatacgcagtcgattgactttccatcaagctcaagctctttattatcccagtcaatctctacaaattctgcctcaactccgatactctctgcaaatgctttcgccatgtctgcatcaaatccgacccactcaccattatcatctttataatccattggttcaaaatcagtaacaccgaccacgagtgtccctttgtctttcacatattcaagatcactccctgttgattccgctttcttattcgcattagaagagtctgaaccacatcctgctaacatagaaactgcaagtcctgcacacaataacacacttaatacttttcttttcataataacaccctccatcattgagtttggcttttattctctaccaatgagtcactgtactacggtaaagttaccgttgtattctaccatagcatacaatatatgtcaaaccccaaaaacaataaccaaaaggtacagaacaatgcaggttactgttcactcccgtgtcaatcactccgctgattgacacggaggatgcgcgttttgacttgaatgcatctcgccccatcgccaaaggcgatttaaaatggcgagatgcgttgctggtcgcacatcgtgtgaacagtaaacaatgcagctgctcatagattctgtgaacagctgcacaaaaagtctgtattatgtatgatttcttctatgtttcctcttccacttctccaaaagtacttcatttggctcaatctgaagattctgcttcacttcgtccatttcgcttctcatctgtgcattcacttcctgatattcactgtgctttgtaagcaaaatgtgaaattcttccagcgacatatacttataagacgcatacagatatggttttagtaattccttatcttcgcagatctggtaggctctgtcatacattttggccgcttcctgataaaggaacaatcgtccatatgcagctccaagacatgcatagatctttccatagaatttttcatctacactctcatctttttcctgattcaggatttcctgataaacgatgattgcttcttcaatctcaccgctttcaagaagattatcgcctttatacttcttacgctctacatccttctgatttttcaaatgttccaaaacattctggatacggatcatctcagattctttatagatctttgaagctttcaagattgtaagaacaaagttctcgacagatccacgcatacgcatcaaatctcgaagctgctctgccagttctttcatcccgatctcttcttccaaccaggtgcaaagcggttcattcatgatcgtataatcgatcagatataaattattacacagatagtaacacaattcttctattgtaaagatcctgcagtggatcctggaaatctcataaggatgtgctgcgtgtctgtcatgacaaagaattaaatttcccatcattacctcctaaatgtatcaccttttcctcacggaaatccgtcggcaggaagaaatctccaaatccgacatcacgtactgtaatcttgcaggttttttcatcctgaaacatcgtttctatctgaagtcttgtagagtactctgctcgctttggaagtctctccaaagagattttttctgtcttaaccgttccctgaaccagtgactcgatatggaattctatatcatcaccctcttcaaggatcacttcccactgattattcgactcataccagtgtgcaccccaggaaacaagcggataccacatttcctgaccatccacacgcatattgactgtaatctgatctgtcagcttagtctccgatagataaaccggattctctatatgcatatacagttttctgtatgcagtatagcaagctcctttgctgtacagattatttccgataaatgctcttcttccattgcaaagcacccgcaatgacttcggataccagttattttcgaacccttctcctgtcaggaatacagaagaaacaatcctcttatcaaacacgctctgtataaatttacagaacatcgcatcggcttcttttgctttgtcctcgttcaaaaccggataaacaagcgccagttctttcatatgtgcatttgcaacttcatcaaccgtaacaaatgtagtctttccaccaccaagtcccggcttcagtctgcgcagcatatatgctttgatctcattacggtcacagcagaacaatgctgcatcatactgccacagttctttcggctgatagaagagataattacaaaaactctctttataatcctgaataaagatatgtcttttatcaatattcatgcgaactgcgatccttcgaagcatctgtgccagttcttctgtaagaaccggtacactgaacacaattccatcaattttaggaaatgactgtaaagacatctggataaactgtgaaagcagccatactgcatcatatgtctcatcaccaaattcaattttctcatttgcaagacttctcgaaagcagacgggcaacggtaaatccttctttcagtgttgcaagacgttttgcctcttttccatatgcccatgtgtctcttagttttccaataatcaaaggaatctgaaaattatctgagtcaacttccagtgtctgaggttccatctctttatcattataaaaactgatctggcatgtcttttcatttatctcatatccaattatacttccctgtcccatgaaaagatttcctccttaatactgtataaacatatgtgatgcaaccgcatcttccagtgcatactgcttcatcttcttctctcgttcttccggatcttcttccagaataatgtcattgagccttccatatctgcccggttcacctttttcaaccgtatgctggcagatctctttctcacttctgtaagaatttccgtcaattgtttctttaaaataatagatcaatcgttcatgcgagaacaacacaaacttcttcacatacaaattctcatacattggtgtcagaagttctgttgcataatcagaatctccgtttccacctttctgcaactgataatacaacataacacggctatccttctggcccttgtattctaccagtgtcttatcccacaactggaattcaatcagccactccttatcatacttaaggaaaaatgggaaataaatctgtttgccacaaagttcctgcataaactttttcagcgtcttcttaaggcttgtttcatactcttgattcgaataatatttcaaaacagcaatcatacaaatatcgattgttgcctcacccttctctgcttccctgcagataatatcaattatagatttctctatcctacgtgcttctacaacatattctctggagacatatgccagataagcctgctggagccggaagtatgcaccttcatcataataagcttcaaatacttttgtctcctggaataattcctctgaaaagagcatctgtgtaatgatccgttctgccagtttatgcgtatggacttcatactctctggcaactttccacaattccttcatctcctgtgttgctccacagtagaagtttgccaaatacgtaagaatcactttatcatactgttttttcttaaataaatcataacaaacataggtcaggaaatcatcattctcataatttgtctcacgaatcatcttgctgcacagtgcctggatctcatcctccgggaaattttccagacccttttcctttacgatttccagtgtcagctcttcctcttcttcaaacgctttgcttcggttcaggctatttgcatattttctgcagatatccatatatctaagttcataaaacagacgtttactctcatatgggatagaatctgtataatgtcttccatcttttgcttcccatacaatgcgatccgtctttgcatacagaaatactctggctccattctctgtatatgctgccttctgtgtaattgttccatcagctgcgattacatgaataaatttcatattcggaacctttgttgtaatccaatatgcgtgacacacatcataaagagcgcggattctgtcctgactcatgtctgtctctacaaggaatcgcttataaatgatccgcagatcttcatctatatttctcttctccagctgattccatgtgaattcttccatctcatccctgtagtgcgcataaatctcgcttgtctcatcttcataagtaataagatttgcatacaaaaatgcgcatttcttataatccagagaatttccatgcataaaatacaaatataccgaacgaggaagctgcttatgaaattcttccggtctcgcagccgccatataatattcgtaaagctgcgcaatcttcagctctgcgtctaccgctttctcataccaatggaaatagatgtgttctgttctgctgccttttataagcaatgtacagatagaagtcaatatcatcgcttcatcatacatctcataacacttcacaagtacattatacagatgtttatcaaaattcttcatctgacttgccaggtttgctgtatataatgcaagttccttcgtcatcagtttatatttcacgccaaaaagcagaacctgtacttcaaactgtccgagttttttaagagatgagctcttctctttaaaacaacggaatgcctgaagatagaaccataagctgtgagacttatactccataaactgcttctcaagcacattcagtctttcactgtagattttatattctgaatcaacctcaatcagcatacaaagaatccgccagctgtccggatgcttcataaaagaacgtgaaagttcttctgcgacccttctctgcccaatcgaatcattactcagttttgtcgtcaaataaaggtaataggaactcaattcaacatccttaccgattgcaaaacgattgtagttataagattctaaaagccattttgcctcatccatccgattacccaaaatgcagatatgtgcctgggcaagaaggtaaaattcattacgttcatctacctcgcgaagatgtgaaattttctttatagaagcctctgtccaatcttccagtgacatcttgtcaccttcatatttcagataatctttcagaattccattaaattctttttcatttgcacgatgttcctcatctctgcaaatatccttttccactacgacctcataactcaatgtttcatatggcgtttccagaatgatccttccaaagttacttcctctgtgaagcttgtccatagaaataccatattccagacgataggcattacctataaattcgtctgtcgtcagatgtctgtgctcaacagaaaggaaatcgccttctgttcttacatcaacctccagatatccccaggtatttttcttcacagtaaaagtctcttttctgtcttctacaagagaaataaaagcacggctttcttcttccaatgtaagaaaaatcttctctttctgcttgcaccctaccaggaattcttcaagggcgtgctgatccagttcccatttacgcatattattataaagcgccttgatcctcgtatcttcatatttgagaatctcaaagaaatctctggaccggaataacttcactgcctcagctgcatcacgatatgtaagcttcttaaaatcttccaggctctgaacctttccgtatcgagtcataacaaatggtttctcaataattgcagtaaatgcaatatcatactctccaccattacatacaatcgtaaatttcccatgttcaacatgtcccggcacaagtcctcttccatcgtatgtataataaatatttaccggatttccatcaaaaccctgctctacgcactgtacacgataggaagaaggatatacaagtccacgtattgtcccttccccttcattctgcagagaaaagcttccctcatatttttctccttctccgacacgcatcgtaatgtgagtctcaggaaaaataatttccggctgcgggatgtgaaaatccccctttgcaaaacgtttgatcttattcttcaaatccgtcacctactcaaatttttaatcatccataagtttgcttctggcaactgccaaaaacgctactataaattatatcattagtatacatgatcttgcaatgggtgattgtataaagttttacatccattttttcattgaaattcctcctttatttcttttgaaaaaatggatacatttttatcagtagcttcctatcattggatacaagtaagtaaaaccgagacaaatcaaacagaacgtgctataataaaattcatctgaatgttatttctacaaaggaggacttcattatgaaattagtaattactatgagtcgtcgtttcggtaccggagccagcattattgctgaagagctttcgaaacgacttgatattccggtctatgacaaggcctatatagaagaaaagctctctgatcacaaatatgaaagtgaagctgaagcaatccggaaactggctgaaaacccttgcattattctcggacgatgcgcctcagatattctgaaagaccggatgaatgtattaaacatctatgtgagtgctgccaaagaggaccgcattcagagaatcatgaaaaaagaaaatcttgatcatgatgccgcaaaagaaaaggtggagcatacggatgaagagcgtgctgcttattattatgaacacaccggcaagacctggggagatgtgaatgattatcatatgattcttgacacttccgaacttggtgttgaaaactgtgctgatatcttaatgcattatttcgaaaaactggaatacatttaatttttcgtgaaagcacggactttggctcgttgctcgtgtaaatataacagggacaaaaacttgttggtcttcacaaagtttttgtccctgtttttttaattctggctgtctgaagtatctgatgtatctgacgttttaattgttacaccctgtttttcaaaactgatcttcttccatacttttttctcttctttgatttttgtatcctttttccactgctccagaagtgaatcatactgttcctgttttctctcacttacaatactttcttttttactgtctgttgcctctctgtccaaaagacttgtaagctttgcaatataaattccattctctgtctctataatatctgtaacatcgccttcatttgtcaatgcatctgctgctgcaatcagatccttatccgggcttgtactttcagaatcaaatgtagctgtctgggctgtaagtcctgctgctgatgcaacagtctccatatcttctccaccctttaaccgatcatcaaatgcctgtgcggtcgtcttcaaagcttctttctcatcatctgataatgtctgggattctcccgaatcatctgttgttgtatatgagaataagagatattgcatactcttctgtgctgcatcttcatctgatacattctcatccacaccagcttccattgccgtttccatcttattcgaaattgtcatcagttcgagaactttagccacttcctcctcatctcctgataccactttcttcacatcatccgaattatcttcaccgaattttgctgctgcatctttaatcgcctgctgctcttcctctgtcagtgcaacatcatagtcagatgcatgctgtgaaacaagatacatattctccagattctcaagaatactcttctttgtctgctcctcatatgtctgattgtctgacacttcctttgcccacatctcttctgctgttgttcccatcatactcgcatagtaggtttcatactgagcctgctgcaatcttgcgtaaaaattcgcgactccaagtgtaatcttctcatcaccgactgttgcaactgtctcatctgtatttattgttccgcatcctgtcaaagatgttgctgtcaatgtgcctgccactgcaagcactgccagcctttttgccaaacgtaccatctggtaaatcctcctctttttacgtatttacttacgcagccatactaccgctcattatatcgtgttttttgttctatcacaaccccaaacacagaatctcctcaacttccctgatctaatcgaagttcgcgaatactctctataatttctcttagcatctgcagaacattttcccctttctcttttccgcttctccctttcttttgataaaggaaatacgggactgcttctgctttgaaagtcatattatttccatatttctttaaaagtgccggaatttttgccggatccagatttgctttttcatataagataaatttgtagtcttttcccttttgttctatcgctgtaatatatgcagaatgcgcaagactcttaagtgctgcaatatgaagaagctgctgtacttttttcggaagatctccaaaacgatcaatcagttcttctgtcatatcatccatctcttcttctgtttcaattgtggcaattctcttataaatatccaatttttgatactcgtttttaatgtaagattccggaataaatgcatctatatcaagatcaatcgttgtagcgtagtctgcttcttcttttttacctttcaactgactgacagcctcattaagcatcttgcagtacaagtcatatccaactgctgccatatgaccactttgcgactctcctagaagatttcccgcacctcggatctcaagatcacgcattgcgatcttgaatcccgatccaagatctgtaaattcacgaattgcagccagcctcttctctgcaacttctttaagcatcttatccctctgatacagcagaaatgcatatgccattcgattggatctcccaactcttcctcgcaactgatataactgtgacagtccaaatctatctgcatcttgtataatcatcgtattagcattcgcaatgtccagtcctgtttcaataattgttgtcgatacaagcacatcaatatcaccattgataaaatcatacataatatcttccaactgatgttcattcatctgtccatgtgcgtaagatacccttgcatccggcaccagtttctgcacacgaagtgctagatctgcaatattttctactctgttataaacataatagacctgtccacctctggcaagttcacgctcaatagcctcacgaaccatctcatcattgtattccattacatacgtctgtattggcatacgatccatcggtgcttcctcaagcacactcatatcgcgaattccgattaaactcatatgaagtgttcttgggattggcgttgctgtcagcgtcaacacatctatattttctcttaattttttaattttttccttatgcgtcacaccaaaacgttgttcttcatctatgatcagaagtcctaaatctttatatccaacatcctttgaaagcactctgtgtgttccgatcacgatatcaaccagaccttttttcaaatcctctactgtttttttctgctgcgcctgcgtccgaaaacgactcatcaagtcaacacgcaccggaaaatctttaaacctttgaataaatgtattatagtgttgctgcgcaagaatcgttgtaggtacaagataaacaacctgttttccttcctgcactgccttaaaagctgctcttatcgcaatttcagtcttaccataccctacatctccgcagatcagacgatccataatcttcgtactttccatatctttctttgtatcttcaattgcacgaagctgatcctctgtctcttcaaatggaaacatctcctcaaactctctctgccagaccgtatccggtccataaacataaccttctgtctgctggcgcgttgcgtagagttttacaagatcttttgcgattaactgaaccgctttttttacctgtccttttgtttttttccactgaggtgtcccaagcttattcaattttggtggctttgtatctgctcctgcgtatttctggatcagatccatctgtgttgccggtatatagagaattcctccgtccgcataggaaattttcatataatctcgagtaacagtatctacttcgactttctcaattccctgataaattccaagtccgtgattctcatgtaccacatagtctcccggtttaagttcggcaaattcctggattttttttccttcataagtttttcttttcttttttttctttttcttaccaaaaatatcagattccgagatgaccgtaaactttaacatcgggtattcgtatccctctgcaatgtaaccacaggttaccataatctctcccggattcacctgccgttccatctcttcactataaaaactgctcaggtcataatctctcagatcttctgcaagacgttttgctcttgttcttgaacccgaaacaagaatcacacgataccctgttcttttcagtttcttcagatctcgtgtcaggagctcaaaactgctattatacggattgacagttttaacctgcagactgtagacagaccttactttaaacattccacattttgattccaacatggtaaatgcaattccataatacttgttcatctttccaatcgtatgatctgtctgttccacctgaatcggaatctcatctgtctccataccggcttcttctctgctctccaagctgtgaaaatactctttttccacgatttctgcagattcttgaagacgtaccggttcatccaaaaacaagattgtctcctttaccggaaaatatgccaaaaagctttccgtttccatctgcttccagttctcagttgccggatagatttctatttcctgtaaattctctgtcgacctctgactttccacatcaaaacttctaatagaatcaacttcgtctccccataattcaattcgaaccggattctcctctgtcagtggaaatacatccagaatcccacctctgactgcaaattgtcccggactttcaacctggttttccctttcatatcctaatatcgaaaggttttcctgtaatttctgaaaatccaacgcctcttctgcatgaatcttaatcctgttcccgcacagttcttctttcgatggaagcccatccagaaatgcgtccattgttgtaactacagtaattgcttcccgtcctttcttctctacaatcgcacgcaatacttccatacgtttccctgtcaaaaatgcgcccttaatatctgcatgataaaacaaaagatctcttgccggataaaaccatacattttcctccagtacacgccattcttcataagcctgttttgctttttcttcactggaaaaaacgatgactctgtactcaaagccatcgctcagtgctttcgcaagatgtatcttctgtgaattcacacatcctgcgatttgcaggaaacccgttttctttcttctcgaactgacaatctcctgataatcagccagttcttttaatggttctaaaaaagcctgcatctctactcgtccttctttttacgattatattcgttcatcgcttcgcttatctggtcactcacgatcagttccaccacttttaccgcattatcataaccttcgctcatcagttcctgttccgccttagaaaaatgtcctaaaacataatctgcaagatcatacttcggtggtttttctccaactcctacttttattctaggaaaaacctgtccgccaagatgtgcaataatattttttattccattatgcccacctgcactgccttttgcacgaattcttaattgtcctacaccaagactgatatcatcataaatcacgatcagttccttctcaggatccactttataatagtcaatcacacttcggatactctcgccactaaggttcatataagtctgcggttttaccaaaatcaccttctgtcctgcaatcataccctttccaatcaaagctcgatgcttctccatagttacatctatattatatctctcagaaagtcgatctataacatcaaatccgacattgtgtcttgttccttcgtattctttcgtcggattacctaatcctgctataatatacatcttcttcttcctttcctaaatgtgttctccatcctcttcttcccactgtaagcaacacgggcttgttgtcatataacttcctcttgcaaacagcaatctttattttaccgcatgtgtgaatatttgtcatgcatatttgctctgtaaattcataaattgtataaaaagggggatactcatgaaatcaaaaactaaaatcattgtccttcatatgaaagagatcatctatactattatttttgctgctcttggcattcttttgattcttcttctgattcttatgttccatccaaaagaaccgtctcctgaatccgatcctcaatgttgcattgctgaaactaacacttcttcataaacactcaaaaaatgccacttgccgggtttgtacagcaaaaaagccacagtccatcctatctgtggctttttgatcgctttttcacaatcactgctattttaattctgcttatccttctacgatcagataagtaccatccggcagtgcaaacacttcagaagcctcttccaattcttcctctgacatcccgtctacatccatgccattctcttcaaagtattctcttacttcagccagagattctacaacaactgccatacagtcctccagaaaagcttctgctgcctcaagggtctctgctaccggttcatcaaaaagctgctcctgcttctccaaaaaagtcttcagacactcttcattgtactctcccattacttctcctcctgtttcttaacaatctttcgtatctcttccgctgaatcaacaatacattcagctccgtcctctaaaagagcttttcttccacggaatccccaggacacaagaattgtctgcatctttgccgcatgacccgttgcaagatccacttctgaatctccgatgtatgctgcttcttccggcaaaaccccaaatgaactgacaatcgtcaacgcggccgtcggatccggtttcttaggaactccatccttctgcccctgtatatggtcaaaaagttcttttccaaatacttcttcaaccacatgaacggcctgtctgtctggcttatttgataaaactgcaagtttgataccactctctttcaactgctgcaacatctgtggaattccttcgtacggagcaaccttgtacatacaatttgcatcaaatatcctggcatacgcttccaccgcctcttcaagatgacacagttgtgtatccccgcctgcctttaatgtccgttcaagcagaaccttcgccccatctccaacgaactgccggcactgttcctttgtgatctgtggcattccaatctctttcatcgtctcattgactgaatattccagtgaatccaatgtgtttgtcaacgttccatccagatcaaaaatacaagcctttatcatagctgcctccatactttatcattggttacattacaccataaccatatctgctcttttctgttactttctgtaacattttcttcccatttatcatagtatgaagtcataaaaatttcaatactttctctctattttccaagaagatattgtctcattgtttttaaagcatttttctctaaacggctcacctgtgcctgcgaaattccaatctgttccgaaacttccatctgcgtctttccttcaaaaaatcgtaaacggatcagccgtctctctctttcattcagccgttccatcgcagcttctaaagacaactcttccacccagttttcttctctgttcttcttatcactgacctgatccatcacatacagtgcatcgccaccatcattatacaccggttcctgaagactcattggtgtctgtactgcatccagtgcataaactacttcttcttttgaaagtccaatctcttctgcgatttcctgaatgctgggttctttcatattttttcgaatataaccttctcttgtataaattactttataagctatatcacgcaatgagcggctcacgcgaagggaactgttatctcgcagataccggcggatttctcctatgatcataggaactgcgtaggtagaaaacttcacctggcgatctggatcaaaattatctacggcctttacaagccccacacatccaatctgaaacaaatcatctgcattttcattactgctgtcaaaccgtttcatcacactaagcaccagccgaagatttcctttgatgtattcttcccgcgccaacttgtccccctgacgaatcctgcgaaaaagctcctccttctccttttccctgagaagtgggagctttgatgtattcactccacacagttctaccttattcacaaccattgtaagaaacctcctaagtttttttctacttagaatcattctcactctttgaataagatattccatgaagtgctgaattttataaagttttagtccttgacaatcaaatatcccatttatccgacaaattattaatctgcgactcgaattttgctttgtctttattcgcgagaccttcgttcttgtaaataacatcaagtaaacgctttcctgctgcaacaagacgttcaaacgccgcatccgctttacgctgtgccggttttttcgccttcaccggaatctttacaccttcacttaagatctcatttgtcaagaggtctgcttcactacacggaaacggtgcataagcctgatatccaaacttttcttccaccgtctttgcaaactcttctgttacagtatcttcaccatgcacaacaaagacgcgttgtggcgcctctttaaacgctcccagccattttaagagtccattcatatccgcatgaccactaattccatgaaggctctcaattcttgccttaacttcaatcggctcaccgaacagcttcacattcttttcgccctcgatcagtctgcgtcctaaagtgcccattgcctgatacccaacaaaaagaatcgtacactcttctctccacaaattatgcttcagatggtgacggatacgaccagcatcgcacattccggaagctgagatgatcacctttggtttctcgataaaattgatcatcttagaatcatcacttgttgttgcagtcttaagtccatcaaatataagtggattaatccctgcattaacaagtgcaagtgcatcctcatcaaaacactctctcatattttttgtaaatatcttcgttgcctcaattgcaagcggactgtccagatatacttcgaaattctgatattcttttaataattccttttctttgatctcacgtataaaataaaggagttcctgagttctgcccacagcaaaggaaggaataacaacatttccccctttatcaaatgtctctttcaggattcttgtaaaatctcccagataatccggtttttcctgcgtatgcagccggttgccatacgtagactccatcacaatatagtccgcactctctgtataagccgggtctttaataatcggctgatccagatttccaatatctccggaaaatacaatcttctttgtcactccgtcttctgttgcccagacttcaatacttgctgatccaagcagatgtcctacatctgtaaaccggatctggatcccctcacagattgtaatgcgctccccatactgacaaggcacaagcaattcaatcgcattaagtgcatcctgcatctcataaaccggttcatactccggctttcctgctctcctgccttttcgattcctccactctgcctcaaattcctgaatatgcgcactgtcacgaagcatgatatcacacaaatccgctgtcgcataggtagtgaaaatctgccctttaaacccatcctttacaagctttggcaacattccggaatgatcaatatgtgcatgtgtgaggaatacataatccacttctgttgcactgatcggaagtcccggattctcatacagatccggtccctgttccataccgcagtcaaccaaaacattctttcctgctacttgcagaaaatgacagcttcccgtaacctcatgggctgcacctacaaatgttaatttcatacatcctcaaccctttctgtcctgtatcttttctttttaagcttcagatactttttcttttattttaacaccatacgggaaattgtacatctttctttttattaaatttttgtaactgttattcataccggaccatttccatccgaagtctgtgcataattttcttttccagtcttgatatataagactgagagattccaagttgatccgcaacctccttctgcgtcatttcttttccctccggatgatccagtccaaacctcatacgaacgattaatttctctcttcctgacagtttattcaaggcacgaaacagaatctttctttctgcctcatcctccagatcccgataaattgtatcttcttctgtcccaagaatatcagatagaagcagttcatttccatcccaatctacatttaaaggttcgtcaatggaaacttccatcttcgtcttactgtttcgtctcaaatacatcaaaatctcattctcaatacaacgtgaagcatatgttgccagtttaattttctttgatggattaaatgtattgattgctttgatcagaccgatagtaccaatagaaatcaaatcttctacacctactcctgtattatcaaacttctttgctatataaacaaccagacgcaaattatgttcaatcagtatctttctcgccttttcatctcgatctgttccaagccaccttaccacctcacgttctttttcattttccaatggtggaggaagaacctcactgcctcctatgtaatgaatctcctgttggccaccaaataaaaccgtcctgacatttggtacaatccttaatttaaatttctccggcacagccactttaaccatcatataaattcctcctggtttctttcttacatcttctgttgcggcacagtttttcattcacaacatctgcaccttgcagttcaatatcaattgataatcttcctctccactgatcggtgattcgctcacaccgatcaacggagattctatccattctttttcatttatttccacacacattttcctgatccggaaaattttcataatgccactaccatgaacacttcgatatggaatatacctgaattccattgcttctttcattacctgatgataaaaattacaatccagtacatgcaccccttcaccactgagtggatctgtcaggcagtttcccgtatccctcaatgcatgaaccttataactatctgcttctgtaaataaaatcacttcacagcaccgttcctgctctatcttaagaattttcaagaacttccaggccatcagaatcccctgtgagctaagcaccgcaatcccataaaacagactgatataatgcagataaggacgaaacatcatcaacgtgccccccaggaacattccaaaaaggtaaagcaatcccattcctttgagtatctggagcatacattgtttcctattttttaaccaaagcatacaaaatggaatcaccagataaaaggctatgtttttcatccaggcgggaacagatacaaccaccatcagacatgtcaacacacttccaaggaatgctccggataaaactcctttaaaactatattttccacccgtaatccgttctgtcacgaaaagtaacaggctatccatcatgaaattttccagaaaaaaaagatctatgtacaactcatagtgcatcttccaccttccttttcatttcgagtcatcctcgatatcatatagaattataaaatttgctctttggaaattttgtcagatactgacagtaaaacagaaagaaaatagaagaatttctgacatccttcgacataaaagaaaaacggcctgatacttcagaccgtttcatcatttttcaattcaattatttcttaaagaaatccggaatcttaatagactgctctcttactccaccagttgttgatcttggctgcagtgttggcattgttccaccctgcggtcttactgttgatgtctgagctgttctttgtgctgtatagtcataagatggtcttgcatgactttctacaccattcggaagaatagaacttgtcttctgctgtccttccagtcttgctttcagcttggatgcacttccgcctacattatgtaagcctgtagcaataactgtgattgtacattcatcagactttgtatcatcatacatagcaccgaagatgatacttgcactttctcctgcaagctcctgtacataatcagctgcatcagaagcatccataagtgtaatgtctcctgatacattaacgataacattagatgcacctgtgattgttgtctcaagcagtggactggcaacagcctgcttaactgcttcgagtgccttgtcatctccgcgtcctgcaccaataccgatatgtgcaatacctttatccttcataactgtctggatatcagcaaagtcaaggttgatcagagatggtacattgatcaggtctgtgataccctgaataccctgctgaagaacctcatcagcctttttcaaagcttccggcatagtagtacgtctgtctacaacttcaagcagtttgtcattcgggataacgatgattgtatcaacgttctcctttaatttatcaataccattgattgcattctgcattcttgtcttggattcgaaacggaaaggctttgtgacaactcctactgtcagagcgccctgctctttcgcaattcttgcgataaccggagcagcacctgttccagttccgcctcccataccgcaagtaacaaataccatatctgcaccttttaatgcagcctggatctcctcagcgctttcttctgctgccttctctcccatctcaggctgtgcaccagcaccaagtccttttgtcagtttttcaccgatctgcataagtgtcggtgctttacacagctgtaatgcctgtttatctgtattcacagctatgaattctacgcctgcaatctgttcgtcgatcattcggttcacggcattgttaccgcctccgccgactccgacaacaataattcttgcagccgcttcagattcgttggttttaatttctaacaagagtagttcctcctttgtcgtcttattaattcttatatacatcccttattttaattgaacgatacaattcaataagtatataataaagtcttttccgtaaataatcaatagattttttcttatttttggtttttttccaacaattcagcttcaagactgcggtgtaaagttaattgatgctgaatctgcttcataattctcaagatgaagcacccccgcctgatccggatactgttccttcagcttctcaagaatcggtttgatctgtgcaattctgatctcatattctttattcccaattaaaacttctactgatccaaaatataataccacactctgttcattggcatataccagtttatccggtgtaagtgaatatttcaccagatactttgaagcctctgcgatcaaagtgaatgcactgtcatcttccaccggaatcttttttccgatctctactttcgatgcatcgaaagaaagtccttccacataaggtactcctgtaaaagttttcttgctttcaaaaagtgctgtccccttccggtcaaaatataaatttgtatcattgaaagaaacataaccggattttcctttctctttcacatgcgcaacaagcgtccatggattttcaaatgtcaatttcatttcttccacaactgacggaacttctgcatctgtataattatatttccagaataaatacaccgtattcatggagagtttatctttcttgagccagctgatgattgaattctctccgtaatattcatttcccttcacctttatactgcgtgtctgaaagagtagaacaaatattacaagcaacagtaatactacaataaagcggaacatccctctcttctttttcttcttttttttcattgatcagattccttcctctgttcatgttttccatacccggactccatctgtatgaaatacaggcaactctattgtaccaaacgtgatatgctaaggacaagccccatttccaaaagcagaaaaacaactgacgttccaccataactgataaacggaagtgtaattcctgtattcggtatagaatttgtgacgacagcaatattcaatattacctgaatcatcatatgtgccatggctcctgctgcaatcaacgcaccaaaaagatccggtgcgtgtgttgcaatcacaaaaaatctccagattaaaatcagaaacagtacaatgatagcccccgcaccaacaagccctaattcttcacagacaatagaaaaaatcatatcattctgtgcttccggcaggaatcccagtttttgtacactgtttcccagcccccggccaaacagtcctccacttccaattgcataaagtccttgcaatgtctgatatcctttttcatacttctccggattgcgccagattgcaagtcgctccagccgatagctttccaaggctagaaaaattcccagaaatccaactcctgatacagccatccatataaactgtgcatatcttggacttgcaacaaaaatcaatgtaactgcgattccgaggataatgattgctgtactcagattacttgctcctaccagaccgacaaccggaaggatcgaaagcatcattccggacattatccgaagttttgatatttttttcacatttcggttgatcagccaggccagaaacaagattactgctactttagcaaattctgaaggctgaaaagaaaacggacccaaagacaaccatcttttggatccgttatattcttttccgaatgccatgacagcaatggataaaccgattgcagccagatatcctggcacagcaagtggaatccatctgtgataatcaattctcgcgatccatagcattcctgccattccaagaactgtagccagtccctgctttttcagataataataagaatcatgaaacttcaccctgccgttatatgcacttgtactggtcagaaggatcagaccaaccagtacgagaatcagcaccgtcacaagcagtgtatcatcatacgtgtgcttctttgcaggacgcttcaatacagttcaccctttacagattatttacaagctctttaaacttatctccacgttcttcataattcttaaacattccccaacttgcacatgcaggagaaaggagtactgcatctcccggttttgcattctctacacattttgcaaatgcttcctcaaatgtatccgccatctcaatatcttcaaatccatgtgctctggctgtctctgcgatcttgtcacgtgtcgcaccaagaagtactaatttttttacttttccatcaaaggaatcgatccattcatcataagcagaatccttatcataacctccaccgatcagaactgtcggacgattcatcgcctgaatccccttaattgctgcatctgggtttgttcccttggaatcattgtaatatacaactccattcttttctgccacatattcaatacgatgttcgactccctggaactctttcagcgttcttcggatcacatctaccggaaccccatatgctgctgccattccggctgctgccatcgcattctcatgattgtgcgttccaagaatattcaattcatctacatggcataccggtgtcttctctccgttcattgcaagaacgatctgaccgttttccagatagattccttcttctaatatacgctgactgctgaaatatagaacctttgactttatattttctccaaatgcccttgtcacatcatcttcgtaattcagaacacaagtatctttctctgtctgattcttcgcaatattttcctttgcctctatgtatgcttccatcgtatgatggcgattcagatgatccggagtaatattcaggatcgcgctgactctcggacggaatgtctgaattgtttctagctgaaagctgctcatctcagcaacaattacagaatcttctcttgtctggagtgcaatactcgtatatggattaccgatatttcctaccacaaaactgctctgcgcatagtttttcataatttctccaagcagagaagtggtcgttgtctttccgtttgttccagtaattgctagaacatcaccttttccaaagacatacgcaagctcaatctcgccccaaattggaagtcctttctcacgcatctcattcacgattggaagatctgtcggaacacccggactcattacaacaagagaaagtttatcaagaagttcttctttcatttctccctcaagtgttccaaggacgatttccagtgactcactgtccccgccttcaatctttgcacggatcgcttccggattcagcttatcgttaccatcatacaatacgacctttgcttcttctttcaaaaggagcgcacacgctgcctctccactgattccagagccaaacactaatacatttttatcttttacaaccattcttttatacccccataagagcgatcaggcaaagaattgccgtcacaatagaaaatactgccactacccgtgtctctgaccatccgcaaagctcgaaatgatgatggatcggtgccatcttaaagagacgctttcctcctgtctttttgaaatatgttacctgcagaataactgaaataacttctacaagataaataaatccgacaataatgatatacagcggcatctgcatcatatacgctgttcctgcaacaaaaccacccagtgcaagagaacctgtatctcccatgaacacactggccggatacacattaaaaagaaggaatcccatcaatgcaccgacaactgcgcaagtgatcggctcaatcccacttttcgttccaattgctacaaccgtgaaaaatgttgccaccagaacagttacgcttgatgcaagaccatccagtccgtccgtaaagtttgttccattaactgtaccgattactgcaaagaaaagaaccggaatcgcaagccatccaagattcaattcataaccgccggagaatggaacgatcattgtaagcggaatcttcgctacttttacgatgtaaaacgcaaaaattgctgttactacaatctggagtgccatcttctgcattggaaaaagtccgtctgaacgtttcatgacaactttaagataatcatccagaaatccaatcagtccgaatcctactgtaaggaaaagtaccgggatgatctttggatagtctttcacataaaacagggacgtaatcacaacagctgccagaatgataatacctcccattgtcggtgttcctgccttcttcaaatgagactgtacaccctccacacgctccgtctggcccatctttaaccttctcaggaaaggaatgaccaccggtccaagcacaaggcttataacaaatgcaatcaataccggaatcactacatgactgttcatatatacacctcttcatttcttttgttttacacagagaatccttcttatgtacttttctgtcatcagatgatgtgagtgtcaaaaataaattttgccactcactgatgtaaccggattgctccattgatatgcaattcccgcaatcctcgaacagcatcagattctcaaaatgcactttacagtatactccattggtcagtttttttcaatcccgagatacggaagtacattgtcatagatgctgcgcaaaaccggagctgcaatcgttcctccgtaataaatcccctgtgggttacggatcactacaattccaagaacctgcggatcttccgccggtgcaaaccctataaatgatgaaatatacttgtttgcgcttcttggaagagtctgtgatgttgcagtcttgcctccgatcgaatatccttcaatgtatccatttttaccagatccttcttctaccacactcttcagaagtattctcatcgtctccgatgttttttcagatacaatcccattcttctttttgtatttcagctttcgtatctctgttccgtctttttcaagaactgccactccaaaatgcggtgtcacccgatatcccccattaaccagcgaacttactgttgttgccatttgaaccggtgttacctggaacgactgtccaaatgaaatcgttgccaattccacaagaccaatatcttctacgttatgcataattgttcccgcttcacccggaagatcaatattcgtcagactaagtaatccaaactgtttaaaataagcataaaatttctctgctccaagccgaagaccaatatcaataaataccggattacaggaattctgtatcccctggataaacgtttcctgtccatgtccaccaaccttatgacaccggatttttctgtcttctacaatccggtatcccggacaggaaaatgtatccgacaaagaaacgacaccttcttcaagacatgctgatgctgtaatgattttaaacgttgatcccggctcatatgtgtcattaatacagggatttcgccacatctgatttaacatctcctgagcctgttcatccgtctgttctgtattttcatccacatcaatcaattcaaaaggggtattcagattaaattccggtgtatttaccattgcaaatatctctccatcctgcggattcataagcaatacagatacactatccgcctgtttttcctcctgaaccttttttgctgcctgttcacagtacttctgaatattatgatccagactgatctgaagcgtgttcccggccacaggttcaatcctgtcttctgctactttctcaagttcgactcctctcgcatccgtcactgtaagaatggttccatcggttccttttaatacctcttcatattttacttcaagtccgatgattccctggttgtccccacctgtaaatccaagaactctggatgcaaatgtatcataaggataatatcttttaaaatcctcatctacttttactcctgcaagatccagattacggattctatcccccgtttcttttttaacattcgttttaattttttccattgaagacactttttctacttttttccggatgttttcttcctcttccccaagttcctgacagagaactgcaatcacctgctccggatcttttatctgattatggatcacggaaattgtgcataccgtcctgttcgttgccaggacaactccatttctgtcaacaatctctcctcttgccgctttgatttttctttctcgctcatgaagatctttcgccagcttctgatagtgtgcagcatcaaaaatcatcagataaaccagtctgccgaaaagagctgaaatcaatagaactgcacagaaaaaaacaaccattgctttttttcggttatatgttttatttttcacaaaaaacaactccgagaaagacatttctacaatgtattatgtctttttcggagttattcctgtttgcctgtctgctataacacttaatctatattggatgatgttgcccagctgtccaaatccggcttataattttcatcaacatatgagccgtcttcattactgtaatcatctgtatagtcctgatcataatcagaatactctgtatcttcaaagctctgaccgctctgctgtgtctgactttcccctgtctcttctatggttgtgataccaagatacggaaatgcttctgacatgatattcttcgcaagttcaagaaccaacgaactattatcctgtgcatctacatttgcttcatcaattaccacatagataacaacttccggattctcctgtggagcatatccgatataagaaagcagatatttcccatctttacgtggaagtttctgcgctgtaccggtctttgctccaatatcatatccttctacctgtgctctcttacctgtaccatactgcattaccgcctgtaaatatgtttttactaattcagatgtttctgtcgaaaccgtcttacggagcaatacaggattcttcgtttcaatcacatttccattctcatcctgaatctgctttacaacatgcggttcataataataaccaccgttgatcagagaactgaaccctgctgccagctgagtcattgtcacattgaagttttgtccgaaagcattcgttgcaagatcaaccggtgtcatcgtatcagttgtatacagaagacttgctgttgatgcttctgccggaaggtcaattcccgtatattctccaaagccaaaaatatgctggtatctgataaaattatcaattccgattttttcagccatttccatcaatgcaacgttacaggaattggcaatcgcatccattgtgctctctgttccatgtccagaacgaagatgacatccgatatcattatctcccacatgaagataaccaccacaataataagattcctctccggtaagagttcctgtctccaatccggctgcaacagtgaatggtttcatcgtagaccccggttcaaatgcatcactgacacagaaatttctccagatgctactcaatatgttcaattgatccttctcatctatcgcattccatttttcttcggaataaatactggacaaatctcttggtttgttcaaatcaaaattagggtaagaggcctcagccagaatttctccggtattcggattcatgatcataaccgctgtattcttgctaccggtcactccacttccttcttctccggcatgttcttcattgaactgttgaatgtatttttccacaatactctgtaaggtaatatctattgtcgtaacaacattattcccattctttgctgcttttacattctgttcgactgtatcatcttcatccagataaccatactctcttccatctgtccccgtcataacatcattgtaagcactctcaattccaattgctcctatatttccggaataagtaaagcctatcacatcgcttgccagcgtattatatgggtatgttctgttataatcatcctccagccagattccctttacatttggataattctcagtatcattctttatctcattatatttctgagccgtctcgtaatcgattccttttttcaatataacatatctgctattaggtttttcttctacaatctctcgtactgtcttttcactgattccgaaacatttattcaatactttaatcgtaggatctatatattcttctttatctgtcattacaacaacatcaagaatcacattataaaccctttcacttgtcgctatctttgtaccgtttctatccagaatatctccacgtttatatggaattgtcttactgtcataaattttctgattcagtacaagctttgtatacttgcttccctttgtaacattaatgtatgtaattcttcctacaagaacaagaaaagccagtataactgctataaacagcagtaccagctttctctgcattcttaccgggaattttttagtcagaaattgaaatctgttcttccttctttttcttcctgccatcttccattattccttatttttcacatccttggattgcgctaaaacgccatcttccgggatgttatcatactgttttacatagtcacttgtcgggctttgataatgaatcactttgccctgagactcataaaccattcccatctcgttcattgccttttcacgaacactctcaagattaacagaatcttctgctgcctgatgtgcagtatcatttgattccttcagatccgtcagttcctgctgcagcgctgtgatctgatctgcacgattcaaaacatctgcctgtaagcgtaaatacataacacatataaaaaccgcacagactgccgccacaattagaaaagtcgcatatgcctgactgatccgctgcgcacgatgccggtttttaatcacctgacggcttgttctttttttcttcggcttacgaactgtcccatttccagacggtaaagcttctggctgacgcacggcactaccgtacacatagaagtggttccagtctgctgctggtctattctgctgtctgcgacctgtgtttctcgccatcgctttcctgtcctttctctggattcttgttccgccgggctctccccttcccggaggaacgtttcgtttatactctaaatactccctgtgatatcaaattatgcacgttcaaagattctaagctttgcactctttgatctgctgtttaccgtcagctcctcttctgacggaaggattggcttcctggtgatcactttccctttggatacatttccacatacacaaaccggaaaatgacttggacaaatgcacggattctcattcttacggaaagaactcttcacaattctgtcttcaagcgaatgaaatgtaataatgcaaagtcttcctcctggattcaacagatcgatcatatcatctaatgtatcccgcaaaacatcaagctcatgattcaattcaattcgaagagcctgaaatgtacgctttgacggatgtcctgacgtcttctgaatcttcattggtattgcatgactaataatctcattcaattgtcctgttgtctcaatcggaccttttgtgcgttctgcaacaatatgcttcgcgatatttttagcaaatctgtcctcgccataatcacgaatcacacgataaagttccgattcactatagtcgttgacaatgtctctggctgtcatcttctgacgctgatccatacgcatatcaagaggtgcgtcaacccgatatgaaaatcccctctcagctgtatccaactgataagaagaaactccaagatctactgtaattccatctactttgtcaattcctatctcatgaagccgcggtttcatatcacaataattgctccggattattgtgaccttctccccgaaaccttccaggcgttttcctgctgctttaatcgcatcagcgtcctggtctatacctattaatctcccctgctcgccaagctttgtacagacttcatatgcatgtccgcctccacccaacgtggcatctacatagatgccatccggttttacgttcaaaccgtctactgtctcatgcaacagcactgaaacgtgctcgaatgccatagactcctccttctgactgcctcacttggcggtctttgttgtcatcagatgcgaattccgatcgcttccatacgttctgcaatcgcatccagatcttcctcgctgatctggtttttctcttcccagagtgccttgtcccagatctcaacacgatcctggactccgaccagaactacttccttctccagatgtgcattctttctaagtgacggtgggacaagaactctcccctgcttgtcgaaactgccctcagatgcacttccaaaaaagtagcgtttaaagattctggcatccttgttcattcgtggtaagctttcgagttcggctacgaatttattccattcttcctgggaatagacaaatagacagccctctaatccgttacagatcacgaagctgtcaccaagatcttcccttaactttgccgggatgatcagtctgcctttttcgtctatgttatggttaaactctcctaataacatacgaaaccctttctctggaatctatggaaatgttcgcgttcgctaaaggtatcactaccgtaatccctttgcttccactccttctccatattgcaccacattctaccacttctcaccacttagctccattgtaaaccacacttccacctttttcaagtcctttttatgaactttttcgtttcttttcagagttcacgttactgttcacttcctgttttgttgcaagaaacacaaaaagaggttgccgctttaacaatgatatgccaccttcatataggataacgaaatataaacatcctataaccggaggacgtatcacttaatacgacaacctctttttattgcactatatgtaattataacaaccttattctgctgaaagtgtactcagataatccttaacagagtcataattcacttctgcaactgcacgttcctggttggaagaatgcagatcatatgctgaatatccgaaccagccaacaattgcaagtgcaattactcccgctacacatctttttacattgcgcatgatcttctctttacgcattgtcttctttcggtccgccttttccttcttataacgatccaccttcgcctgactcatctcttgcctgctcccttcctattaggtctttagcaattattctaccacagcacatcttaaagtacaacaataattccaccatcattcgcatacatactactaattcctgctgtatctacaataaaggaatctttcacctttactttctccaaaatcaattttctaacgacctctgcacgttccggacagttgcaatgtgcaattgcaagaatcttctcctccggttttacagcgtccttcgcgacatgctctgccatcttcgccaaagctttcttcattcctctgctcttatccaactgacagattgttccctctggggtagaacccataacaggcttgatattcaatgcgctgactaccagagatttcagtcctgtcagtcgtccattcttacgaagtgtatcaagattctcaagaacaaaatacgtatgctgttcttcaatataagcttctaccgtttcaaccacctgttcaaaatccattccggcttcttcacattcctgaatctttcgtccgatcaacgtctctccgacagatgctgaacgagagttaaatacatggatcttttcttctccgccttcttccttataaagtttctctccaagaagtgcactattataagatccgctcaattcccctgacaaagtaactgcatagactctgtcaacatcacatttgtataattccatataacgctccggggatggacaggatgacttcggacattcctcgcttgcagccactcttcttaaaaaatcagcctgatcaaatgtctcgtcatccggaatgtgaaagccatccacttccatgctaagagaagccgtcttaaaaattccactctccttcatctgtagggtcaactctccgcaactatctacgatcactctgtaactcataacttatatcctcccatgctctatcgcatattttcccatcctactttacgtggtttttaatactacatattaatataacacacttcagtcaagttgaaaagagggagaatttatttcaaccggatcttcgaagaaattccaagcgcaattcccatctcggccagcaagatcacaattgccgtacctccatagcttataaacggaagcgtaactccggtagtaggcatcaatccggttacaaccgcaatatttaaagtaacctgcagtgcaatatgtgcaaaaatacctgttgcgatcaacgcaccatacaagtctggagcatttctcgctatgaacaataatctataaagcataaaggcaaacagacacaaaacgagaattgcaccaaacactccaagttcttcacagataaccgcaagaatcatatcattctgtgcctccggaatcgcatgcagcttctgtgtactgtttccaagtccttttccaaagaagcctcccgaaccgatcgcatacaatccctgtaaaaactgatagctgtctttatcagcattcgcctctggattcagccatgcaatgattcggcgcatacgaaagttatcactttctgcaagtgtatatttcaaaaaaataattccaatgattcccacgattcctgctgcaattactccagcaacaaatggtttggtcttcggatgtacaacaaaaattaaaatacatgtaattgcaaacacaataattgctgtactcagattatccgttaatagaaaaactcccagtgttgcaacaagaccataaccaagcagaatcttaattccatcccattttttcgccttttgccccaagaggcagatttcatatgctataaatagaatcaccgcaatcttcgtaaactctgccggctgcaatgacaagccaccaggaagcctgatccaccttcttgctccatttacagtcttaccaagtggtgtctgcaccaatgccatcaaaaacattgaaaaccaaaaaaattcttttgcatacgcaccatacagatgatagtcaatcttagaaacgataaacattgcaagaaatccgataataccgataattgcctgccttgtaaagaaaaacatatcattattataatcattctgtgcactgtaggcactactgctataaagcattacaagcccaaagcacatcagaaaaataattacaagaagcagatcataatcataataaggtttccccttttctcttgtccttttacgttttgtactcgcagacctttccgctatttgccgtttcccctgtaccgcagtctgctgagaatacggagaacctgacgttctcacaaccttctgtctctgctctattgagcttcgatacttcctataagcatcactctcatagtttctcatacatactcccatctaaaatctgtatccattctattttttaacattcccaattaataaacagcagatacacgttttattattgaacactcatcgccggatgaatcggttttccatgctcaaagaatctgtcataccatacgaggaagatataaactgtccagatcttacggctgttatccgtcttctcattcgtattctttccgttcttatgatcatcaagcatcttaagcaagagcttcgtatcaaagaacttcttcgctgcatcagactcaaacatctcttttacaatattataatacttctcttccttcaaccatacacgaatcggaattgggaatcccagtttcttcttctccgctgtcttacttctgatatgtcgctctgccgcagcacgcaatgcaaccttcgtctttggcgcacgtactttgtattttaacggaagtgtctcggcaagttcaagtacttctctgtcaaggaacggaactctgacttcaagagaattcgccattcccatcttgtcacccttcatcagaatatcatgcaccagccataaatgaagatccacatactgcatctttgtcacaggatcttttcctttcacgcgcgcatacaatggttttgtcactttttggattcccggcttacatccttttttcaaaatacgatttgcctcacgctctgtaaaaatattcgtcgcatttgcgaaatatctctcttccaatgtctttccgtgacgcataaggaaacctcttcccttcataccacgtggcagacagcgttctgcaaacgcacccaggaaacggcgtaccggcatcggtattttattaaaagaagtatgttccaaaggttcacaatatatgttatatcctccaaacaattcatcagaaccttctcctgaaagaactaccttaaccttcttggacgcttctgcactgaggaaataaagtgcgattgcagctggatctgcgaccggctcatccatataatactgaatatccgaaagcttatcccaatattcttccggtgaaatcaccttagcgtcattcttcatgttaatgcttgctgcaaattcctttgcatcctgaatctcactgtactttccttcatcaaatccgactgtaaaagtacgatccacctgtcccagataagtcagataactggagtccacaccactggaaaggtaagaagcaacctctacatcactgattttatgcttctcaacggaatccttcatcacacgttctacatcatccaccacttctttgaaaggcttcttacagtctcctgtgaaatgaggttcaaaataacgtgtaatgttcatttttccattttcatatataaagtaatgtcctggctgtacacagaacacccctttaaaaaatgtctcattcgtaggaacaaactggaaagaaagatagttgccaagcgcctcttcattgaacaccttatcaaacttcggatgctccataaatgctttgatttcagaagcaaacatcaatgtaccattcatattcgcataatatagcggtttgattccaaaaatatctctcgctgcaaacaatcttttcttctttgtatcccagattgcaaaagcatacattccgcgaagacggtctaccagtttctcgccccactcttcgtatccatgaatcagtgtctctgaatctgtattcgatacaaactcatgacctgccgctttcagttcttctctcaggtcctggtaattataaatctctccattaaatacaagaaccatgctgcgatcctcattgtacaacggctgatcaccaacggaagaaagatctatgatactcagacggcgaaatccgagtgctgcatcttcatccacatactttcccgcactatccggtcccctgtgtacgattgtattcatcatattaacaagtacctgttctctgtcatcaacttctccgacaaatcctgcaaatccacacatatgccttctccttttttaattactgtcaactgtatatttgttactgttcacacgttgtgcgaccagcaacgcatctcgccattttaaatcgcctttggcgatggggcgagatgcattcaagccaaaacatgcatcctccgtgtcaatcagcagagtgattgacacgggagtgaactgtaacgtatatttacaccagacaataaatctcttttattatagcctcttttactcagggaaaaaagtccctttcatcagaaaaacagaaaaatactgtgagtataacatcacagtatccccattgatcgtatatttaattgttatggtttccccatcaacgcgtatattatatctgatttatagggaaaagtaaagggggatttttgagcagtatttacataaaatgtaaatcagggattgccgtctgacaatccctttcacaaaataaacacttcatcttcattcaaattctgggttgatcgcatagaaattcttactgtcaagatgttcctgtacaattcttagactttcaccaaatctctgataatgcacaatctctctttctctcagaaaacggatcggatcacagatttcaggatctttaatcagccgcaggatattatcatacgtagtccgtgctttttgctctgctgcaagatcttcatgaagatctgtaatcggatctcccttcgattggaaatacgttgcagtccacggagctccactggctgcctgtggccataatgccagtgtatgatcaacataatacggtgcaaaaccggaacgttcaatttcttccggtgacaaattctttgtcagctgatagataattgcacagatcatctccatatgggcaagttcttctgtaccaatatcagtcagtattcctgttacctctttatatggcatcgtatatcgctgtgaaagataacgcatagatgcagctaattcgccatccggaccaccgaactgacttataatgatcttcgccagtttcggattcgtctgggttatcttcacaggatattgaagtcttttttcataattccacataaatcagcatcccccttcctgccacggccatggttcattgatccaattccagcagtcactgttttcgctgactgtatctacagttaaaggtccatatacctctgcatattctttgagtgcttcaatacgtttctctttatatttttgaaaatattcaagtgctttctgattttcagggtgcgtatctaagaataatttaacatcatccaccgcgaaactaatctgatttatatattcaaaaagttctcttcgattcatttcatgacaattgcaactcatttacagcatcctccttttccacgaaatggtttttcaagctcttgaaaaatagttccacactgaaatccataaccgagatcgtgaagttttctccactgctgccatgggacataagccatcgcaaccggaaactcttgcaaaacatccgttttgctgtaatcaccaacacactcatcgcaacaataatttttcgacttctgctccggaagtggaggaacaggaatattgcaatgaagctgtctttcattttcctgccttgtttgtggcctgtaatttccattctgacaataacagttcgtattcctattagaacaatatggtgccataaaataaatccttatatcttttttgttattgtatggaagataagaaaaattgtgaacaacagcaaaagggattgccacgtgacaatccctaagcataatgcattcacttaaaagtagtttttattttgcacctaaagtaacttccactgtcttctcttcatattctccattactctgtggaatctgaattgtcagtgacaccttatctcctttggcataatattgaaactgttcctgaagatcatccatgcttgatacggttgttccgtcaattgctgtgataacacttccttttgccattccggctgcctctgctccaccgccttttgtaatttctgatacataaacgccttccggcatattcagctgtttggaatattcagccggcacgctcattcctttgatgccaattgcgccctgatctttttctgcaacctttgtctttgtcgcctgattcatcagattctggatcagatcggatacatcactgattggaattgcgtatccgacaccttctacagaatcaccaaccagcttagatgagttaattccaatcacttcgccacttgcatttacaagtgctccaccactgtttccaggattaatggctgcatctgtctgaatcagtttggcatcactctctgttgtctcaccggtctgctcgtttgtttcagaaacagaacgattcaaagcactgattacaccagttgttactgactgtccatagccaagtgcattaccgattgcaatcgcaggttctccaacctttagctgtgtggaatctccgagtgttgctaccgaaattgctttcatcgtatcatctgaaatagaatcaagcggaacagccacaacagcaatatcatactctgagtttgttcctttgatattcgcctcaacacttgttccatcatcaaacgtaactgttaatgtatcgcttcctgctactacatgattatttgtaacaaccagaagttctgaatcattttgagaaataatgattcctgttccagcactttcgctctgttgctgtgacacaccaccaaagaaatcctgaacctgctgcacactcatatttgtaattgatacgattgatggcattacattttccacaatacttgaaacatctgaagttacaacactggaagatttggataatgaagcattgctgctcacagatttggttgccgtagtattagtcttcgtcacaccggtcaatcccagcactttacttccaacaacatttgatgccaaaaatgtaccactggaaacaactccaaacaatagtgcaaatcctgtcactgccactgctttgggaattttcttttgtggtttcttaccatgcggtacttgatgtttctgaccaccattgtcatcatgaaatggtgtttcaccctgtccttttccattcattccatccgaattataataattatattgattctccataaagattacctcttctcttgtttattctttttctttgatgtttacatagtaactccgcattgtgataaatctgtgtataatcaattaataaagattgaaaagaacgatagaaaaacaggatcagaacttccttcttaatccgttctaatcctgtctatattttttcaaccagctaaccagtatctttcatctgtctcttaaacttacagatcaatgaaatctacatcataatcatctgattttctttctttttttgattttttagctgatcttcctaaatttcttgtatttcctgtcggtgcatcatattcatcgtcataatcatcatcgtaatcatcatcaaaatcataatcagcatactcatcatcaaaggcatcgtaatcatcattaaaatcatcatcataaccatcgtcataatcatcatcttttacttttttacgtccaaacgcctttctgtctgacttcttagcagcaaccggctcgtcatcttcttcatcttcaaaaggaatatcatactcgtcatacaaatcatcaagttcctgatttctatgcacaagttttactgcaaacataatcataagaacaagtaatacaactacgatgagtgctcctccagccagaagaacaattggatgctcttttacaagcgactccaattttccaacaatcccttttgcttccttctttgtactgtctgttgtctgaacatctacactctgataagttccatcctgtgaatcatactgatagaaccctttttcacctgttcttgtattcactgcatacagaagatcataacgatcattctccgggtttgcccaatatggatatgtctgatctgctactgtaagttccccttcctggtatgaatccggaagttttgctcctccattatctgctaaaagaataatagatgttgtgtcagaaatcttcagttctgtatacggagcaaatgtagaatcatcttcattgtagaggaagaactttccttctccggaagcatctaccagatatccaagtgtaacaccagcctcattagcaacaaacttgtgctcttctccattgaatgtttttgtagtctcactgtatcctaccggaatcgcagatgttgcaaattcttctgaaaaattgtaatctgttccgttcacacttactgtgatatctgtagccgtacctgctgctgtactgccagttgcctcaacttctgttgaaccatcatctgcctgttcaatcttaattgcggaagatccctgatctaatgtcagcgtctcatccgaatacagataagcctttgagctgtcaactgtgatcgttgtgtctcccatcttcaaggctttaaacttcattgtagtacgaagctctgtcgctgttccgtctccgcttcctgagtatgtaagcttgccatcactgtctgctgttacaccctctccgctttcaaactgaagtgcagaagtatcataactcattgtaatatctgcatcaccaacagctgaatcatcggatctcacaacaagatctacacttacttcctctccaacctttgtctgtggatcagagaacatcagagaaccatcagctgcacttacgattgtgctgaacattggcactgtaagacacagtgataatgctactgctgccaatttctttgctttcatataattaccccttcttttgttgtcttaaacttatataccatcctattgtacactgtttgaatggagttgtccacccggaagcgaaagaaatcttgtatgaatcattatttacagatttccttttttccttgaagctattccaatatactatccgaaaatccactttctgaacatttcgcagattatcttaaacgatttcaaaaaataatatgtataatggttcacaaatagcatatacggtttttcaaccaatttttttcgaattaaatcaatcatagtacaagaaacatataaaataaacacaaccaaaattgaatataatatcagaaaagtactatcctgatattgattgattttaaagatattcgtccataaataataacgaatataagaactgtcatgaattaggtataccccaaatgttgctgatgcaatcatattaatccatttatgatagttcattttcaatgttacaaatcccataaaaagtgtaatcgccatcaacaaaattggaagtctctctatttcaaaaaaatcaattgcatgtgttgaccactcctctttttttgttccaagaaaaagaaacgtcgtacttactgtatatgttataattaacaccataaaataaagagaaaaataatgtttcgattgaagtttctgattacctccatacaaatttacatatcctgcaattccatataatgttacaaaccacaataatgaattactctcaaataactgagttgtagccgtaggtatgattgaccagcacaaaaccatcatcaagatcaagtactgatattctgtcttactcaacccatgcaacagtttatttaaaaacggatgtattaaatataacataaaatatgtacttgcaaaccaccaacccggatacgtgataggaagacaaactttaatcaattgctttatctcaaaagcattcaatcgtaacattaccgataaaagatatgtcataattgaataaaaaacaacctgtccccaaaatttcaaaagttttttaggctgaaataacttttctgtattttcaatcagaaaatatccagaaatcaatacgaaaatatctacaccaactttcccacccatgagaataaaatcataccaaagatgtggaagtgtaacctcattaaaattccattcaaaatttccatgataagcaaaatggtgaaacatgatcataatcatagagatgattcgaagtaactcaattgaagtattacggttaattatctttgtggattgaacacttttttccatattttcacttcactccttccattcatatctataactaatatatttatctcattttcactttgttcttaaaatccccttcaccctaagtacaagttctttgaactcatccggttcaaccacataatttaccccaacaatagtaaatacgcttacagccaccattccgattgcatagagaaaccatgtgataaaagatgccatgttcttaggaataacatatgttccaacaatacaaagaagtgcaacgacaagtacatttctaaaaattcggaacatagatttttttgcacatccttttaccagatgccgacttgtatagaacacaatttcaaaagagcgatatccataagaacatactgtaccaagaagaactcctgccatgccgaacttccataccagcccaagagaaaccgtgatatttatcactgcttctaaaatcgcctgatatctcgtttctttataatgccctgctgcgcagataatcgtcaatcctggaatccttacattttgcataaaaacaattactgtaaataaaattccaagaaccggacgcacatactgtacatccgtcaggttaatggtatataccccgacaaaaggcaagattaagactcccatacaggcaatcacaataaacatgattacaaaatacatatactcataactagaatagctcttctttaatgtctcttcctcattcttggcgatcacttctccaaatcctgctgtcagaccattcgaaaaagaggtcatcagctgattcactgcattaaccaccatcatataaattccatacacactgacttcaagaagagattttgcccccagacaaattgtcaacactgttgtatctgtattatttacaataataccaacaacctgatgaagcagtgccgcgtttttttgctttaacgcaccttcattcggttctgcatggaaatctaatgcaggatattttcgttttgcatagattttaaccaatacaagacgaagcatatacacaccagttgcaactgcctttacaaaaagaacacctgctccaatataaatcagaaaaatagaaacaaccatattaacgatcgttcctgctgcctgaatcagtgcaaccacatatccttcctgatttgcagtcaataaaactctgtatttacccagaaaaaaataatccactaaagtacttcctgccaaaacaagtatcatccaacgcacaagactattttcaagctgtcctgaaataaaaaacggatagacacctacaagtaccagtgtcaatgccagaaataacattccggatttgttataaaattttcttgacgccgaaagaattgaatttacttcttccgtctgattcaatgcaagaggtgtatagagagcaacaactgttgccgttcctactcctgcttctgccaggcccagatatgttaaaaactgatttactgaagtgatcattccattcacactcgatccatatgcctcaagaataaaacgtggcaatatcaatccagacaaaagaacaattacctgtaaaagcagacttgccaccatgttttttaatgcctgttttcctctcatgagatttcctttcctctactttttcttttcctcactcatgaataccatcttcctgtacaagcccgtatttacgcacaatacaacagatgaaatctttctctttggctgaaaatatggatttcgcaggattgtcaggatatgcccgcgaataaagcgtttcaaatcctgatatccttctaacttcttataatcctcctgtaatagcatcttatccagaacaataaagcgagaccagatccagaggcactctgcctcctgtgttagtgatggaaatttttctttcactacttcataattctttgtatatccatctattatgtcaaatactttcggacggtatgcctttccggtaatactgtcttctcgatgaagataataatacttcggctttgttcctactgccactttcttaattcgctgcatgaggtctacagtataataaatatcttcatacagtctccccttcggaaagcgaagatcttcaatacagcttttccggatcagcttattccatatttctccacggatcgtatgccccctgaggatacagcgaaaagcctcttctcctgtgcagacaaaatccacctcttccttttgtgtctcgattctgtctttatacacttcatataagccacatgttgccatatctgctccgctatctttgatacgtgtatacatatattcaaacatatcattttcaatatagtcatcactgtctaaaaaaatgatatattctccttttgcatagggaattccagcatttctggcatcactaagtccaccattttccttatgtatcacttccactcgattgtcctgttttgcatattcatcacatatttttccacactggtcgggactcccatcgtctaccagaatcacctgaatatcagaaaatgtctgtcccaaaatggaatccacacactttcttatatatggttcaactttataaaccggtacgatcacactgattgtcggcatgatatctcctccattttattcatagtatgaaagcagagtctgcgcagcgctttcaatatcatatcctgcttttgcaaatgcctgcctgattcctgaattttcttcttcgctcctattttcacctttgtaagaaagaatcacacggctccattcctttggtgaatcctgaagtgacagaaatttcactttttcaactaacttcacttctgttgtaatcgtatctgccattacactcctgattccggatgcctgcgcttccaacgcaacaataggaagtccctcaaaaagagatgggaatacaaaaatgtccattcctttccataattttgcaacatcttttctgatccctaaaaatctgatcctatcttctattccgtattcctcagctttcttttggatcatttcctgaagttctccttctccaactaacaaaagtatagcttcttcacaggcagatgcaacctcacgaaagatttctaagagaaatttatgattcttctgttcttcaaaacgtcccacatgtccgagcacaaattttccttctactcccagttcatgacggatctcttcacgttctgacaaactgaaagcaaattttttcagatcaagagcattgtggataagatgataattgttactctttctgatcttttttgaaaagagccattttccagccaattcactgcatgcaaaatactttgtagcaaacattggaatcaacggtcggttaattctgtgcaacaaatttctcaccactcccggagtcgaagaattatgtgagtgtgcgatcactgttggaacctttccatagcttgccacaatcagcggtactatattcgctgctgacagcatatttacatgaactgcatcatatcttccaattcgaagtatctttctcatttgtctgctgaacttcaatggatgttttcttgcatcacacgtatgaaacacttttcctccaagtgacttgatttcttcttcatacgcaaggtgtggaaacatacttataaaatcaaatcttactccttgcttactcaatttcctataatatgtcatcacaaaactttcaatacctccgggattaaaggataatccaacttgtaatactttcatttactttccaattacttcctttccattgtcagttcatctatcagattcgtccactgtcgataaatctcttctttttcaaatttttttacacccgatatcgtatgatttgaaaacgcaattcttcgttcttcactatccgtcaacaattctatacgatttgccatcttgtccaaatcataaggggggattaaatagccatcctttccctcctcaacgatttctcttggccctgttgtcacatcaaaactcaccataggaagtccacttgcctttgcctcaagcaatactaacggcaatccttccctgtaagatggtaataccaaaaatgcatattcattatacaacttatacacatcttttacattccctttctgaatcaattgagacgttaaattgtattctaccaccttttggtgtatctcgtcaaaagtatctcccgtcccgtataaatgccattcccactcaggatgagaaggcaatacttttttcgccacttctaccagaagatcatatcccttttcttcactgaatcttccaactgtgatgatttttctcgaatccgctttgtatttctttcgcatagtcaggatttctggtttgatccaattatatatacttcggattttctttggatttatatgaaattttctaatataatcctgtctgttctgctccgtcaatgtcactgtacaatgtgaaattaacgaatcccagaaacggaaaaagcggatatctttcttctcccattcattcatcaatgcaccatgatcgcaaaacacatactttgctttcgtaaaaaaacgaaccggtgaaaccgtcatagcaggataattctccataaggaaaactacatctatttgattttgtctaacaaattctctaaatggttgaaatgtcttcttaattctgtcgcgtactcgacactcttcttctagttctgctctgtatgtgattctcggatccaggtcatatggaacatgccctccttttccaaaaattgcataaatatatacttcatattctttacaaaactcattggcaagagttgttgtgacttgctcaactcctcctgttactgtcatatcataattaacaaaacatatttttttcattctgaatattctccatctgcatagtgaacaatgaatatcgttttactaagaaggcgcctattgaacttacaatagacgcccaaactattatttctttaatatgtttgcagattcttcaccattttttcaatatcaataccatatccttcacttgtagcccagccatatccatttggattttctttctgaccaagccattccacataaggagcgcttcctcttgtaaccaatgaaaatcttggatctacgcattcattctttaatgcatctttggatccatatgctttcaaatgctgaatctgagctcgtattccttcgcgtactgtagtaaatgatgctccggcaacgccgccaccagttgttccaagtcctgcaaaattattctgttcaatcttaacatcaccaccaaatttaagccatgcagtctctttcattgcctgtgtaaatgcaattgccccattgattccttccgcattcgcttcttcaacgtaaatctgacagaacttttcaagtgttggcgcatccgtctcagcgtaatatgccggatatgttgcacccttagccttaaaatatttttccatctgggatgcagtcacagtagtctttccagaaatagccatcaactgatctgtagtacaagaatcatccaatgttccattggttcggaaataataccatgtattggatataaattgccatcctgtctgcatcactccgtttttatccaaataatatcttgtttttccaaaagaaatccaaccggtcatcatgtagccttccggcataaagaaatatttctttccgtcaattgtctgccagcctgtctgcataattccatccgtattaaaataatatttctttccactgattgtctgccagcctcgtaccatttttccgtctgatgcaagataatactttgtacttccaaagctgcaccatcctgtcagcatatgtccatccggcatcagataatatctcgtctgaccaaaagaaatccaaccggtcatcatataaccttccggcataaagaaatatttctttccattaattgtctgccagcctgtccgcatcactccatctgtgccaagataatatttcgtgcttccaaaagaaatccaaccggtcatcatgtaaccttccggcataaagaaatatttctttccatcgatcgtctgccagcctgttactgctactccattttcattgtaataatatttttttccatttactgttttccaaccacgtttactctctacaatcagcttaccgtcagaagcaaacgtatacgttgtcccgtcaatcacctgttttcctgtcaccatcacaccattagaatccagataataccttgtcttaccaaaagaaatccagccgcgcatcatatagccttccggcataaagaaatatctctttccatcgattgtctgccagcctgtctgcatcactccatccgtactcagatagtatttcgtctgtccaaaagaaatccagccacgcatcatatagccttctggcataaagaaatatcttttttcactaattgtctgccaacctgtctgcatcactccattcgcatccaaatgatatctcgtctgtccaaaagaaatccagccacgcatcatataaccttccggcataaagaaatatctctttccatcgattgtctgccagcctgtctgcattactccgtttttatccagataatatcttgtacttccaaaagaaatccagccggtcatcatataaccttccggcatgaagaagtatttctttccattgattgtctgccagcctgtctgcatcactccatcatcattaaaataatatcgttttccatcaattgtctgccaacctcgtaccatctttccatctgatgcaagataatactttgtacttccaaagctacaccagcctgtcagcatatgtccatcgggcatcagataatatcttgtacttccaaaagaaatccaaccggtcatcatataaccttctggcatgaagaagtatttttttccaccaattgtctgccagcctgtcacccgatatccatttgcgtcaaaataatatctctttccatcaatatctttccaggaattagttacatattttccgccttctttatatttccatccattggaatcctctacccaagttcctttttccttagatactcctaaatactttgctataccagtagcatccgcaacaccgagtttttttaacccagcttcattattcagatatgtatttacatcgcctgtattcgttacaaatgcatgttctactataattccaggaatattattttctttcgctgcaatctgaaccgaaaaataatctgattttgatccatctggatacttttcatctgccagtgttgtatctttactataaatagatcttttctgcaaaccaatcgcagtcagctcatccataatgtcattcgccagctcttttccctgctgtgcaacttctggtttccaactatcatttggtacaattacttctgcaccttttgctgaagtcgatgtagaagaattcaaatgaaagctaacaaatatacttgcccctgcttttgcagccgcatatactctgtcactgatatccccaccactgttcttattgcttggatatgggcatgctgctgtcgttcgtgtcatgtaaaccgacacattcgcatacttttccaattcttccttacaatattttgcaatctttaaagttaaaacttcctctcttacaccatttgctcctgctcctgtgtgtgttgaatcatgtcccggatctagagcaaccacaacattcttattgacagctctcgaatcatctacagctcttgcattatcctctgcataagtctgaatatcttcatccgaaccatattcttcaacttccgctttctccaatgcatcttctatactggactcttccatcacatttccatcttcatcaatactcataacagcaacatcatactgctcctcatcagttgctgcttctgcatccggttgtccttcaatcggctgtaattctgacattccttcatatgtttcattaacaccaaattttgcttccattccaagatccgacagcaaataacttgtttccatctctgctgtctttactgtcaatttggttattgtataaattccatcctctccatctgcatatgccttctcatatagaaagacaccgtcttctgattttacagaagtccatgtttgtgtatccccattatgttctacacttaaatcaatctcttcaatattttctgttccatccccccaggaaacaacaattctctgtgttgccggagtttctacgtacggactttctatgtacaaataattcaggtgctgctctattgcattctgaacttgattttcttctatctgctcactgtctgatggttgattttcaactgtttctatatttgtatccacttttgtgtctgttgcataaaccggtactgatgtaaccacagttgctgctgctaatattgcgaccagacaagttcttatttttgatatcattttttcctcctacttattttctatgtttatcaattgctcttatttccatcagaagtgattcatgtatccatctaactctgtatcacctgtatctaatgcctgtccattctctgttaatttaagtttctcacagttatatgtatccaaataggagttcacaatacatgtaagtatttcatctttccctgtggtccccatacttctgatacgttcaccaacttctgtattcatatccagatctattgttttattattctcgtcaattttacaactgttcaatttacaaccttctgtcagaatacctttttctattaattgattccaaactgttgtatcatctatgttttctgtcttcatctcttccgaaacgatttcagcattttcattcacatagtaaattttcaacgtcttcatctcttgcttttcttctgaaatattgcttttttcttcctcctgtttttgattatttttttcagaatctatcgtttcacttgtatccttattgcctgaatcctctactgtagtattttgttctgtatccacattgtttttctcacatcccactgaaaaaagcaccatacttgtcaacattacaactactaatagctttttcatataccttaacctcctctggcttattgctccccacagatttctctatgataataacacaaaaatgcgtttaaaaaaagactgattttccaatcagtctttttctataacatggtattttaaattatttgtaatatgaacttggaagctgttctgtttttactgtttttccgtttttaacataatctctataagcaaccgctgatttgcttcctgtactccatgatcgtacattaacataatcataccagtctggttggattccccaaacttcagcatacaatgtttttccactgacatatgtcaccagtttcaccggataatcatagtcatttctgaatttcaaatctgatgatccataatctaccattgcatcctgaccgatcggcacatatgtagatggaacagaatggtttcttctctgaacaattgtaagtccggctcttattgctgctccgtaaagcgttgtactcgcctgacagatacctccgccatatccaacaccacctacaactcctgcctgcttatatccctctgcttttccacatggccctgccacgccaaaaaatgaaagggtctgtcccggctgaatgacaacctgattaaagctctttaatgctctactcatattatatgttccattttcattatttgtagacactgtagagaatactgacattctatccacataggttggagatgttatccttaagctcaatgttaaaatctgactttctgaatccagtatatctacataatatgtatgtgctccatttcctgagaacgtaaattcacatgactttttagtagaataattttgtaaaactttgttatttccaccatatacttctctgaaacgatatttgtgaacattatcataacctccactggaagttgcagtcaactgtattttttgtccgttttttgctataccatttgtattacttacaaaggaacctcttaactgattatccggatgtaccactacctgcattgtgtacgttgcacgtaccacctggccttcatcatcttttacatccacatagaaaatatgtgttccaatccccgtcgttgtaaaagaatatgtgtttttataactataactctgtcttacctttgtagttgctccatatacttcagtaaactgatactgacgttttccgtatccacccactccactgccagttaatgtaacagttctttttgcatattctctcgttgtcttattgcttctgagacctgcttttattactttatctggatgtactacaacagtcatggaatatttgagttttgtactctgattctctttatcctttatatatacataataagtatgcgttcctggccctgttgtcttaaatgaatacgtcttcttttcactatacttctgaacgacagttacttttccattataagattctacaaactgatatttaagtgaaccataaccaccttttgcatttgctgttaagcagatatttctatcgatatattcttttgtcgtcttgttacttgtcacactacctgtcaacacattatccgggtgagcaacaatatccatctcataagatgctctagatttctgtccctgttcatcaatcatgtcaacataaaacacatgatgtcccgttcctgaagttttaaaagtatacgtgtttttctcactataagcctgtcttactgccgttgttgatccatatgtctcagaaaactgatatttgatctttccatagccgcccttggctgctgctgtcagaacaactgttctttgtatatattctcgatttgtcttattcgaactaagctctgctatcaatttcttttgcggatgcagtacaactgtcatcgtataggataactgtatttcctgtccctctgcatctttaatgtaaacataatatgtatgttcgccacattcctttgttataaatgaataggtatttgtgtcaccataatcctgtaatgctgtttctacaccgtctttcttctcagtaaacctgtactgataattcccatatccatttgttgcttctgcagttaacgttatctttctgtctacatattctttttgtgttttattactggttaattttcctgaaagaactttcgatggatgtgcaaccacctcaatcttatactctgctgaccctatattgccattttcatcttttacatttactcgatatacatgttcaccaacgccagatgtcttaaatgaatagactggattttctgcgtattcctgaacaacagctgtttcccctctatattcttctgtatactggtattcaacatttccgaccgcatcctcgacatttgttgtcaattctacggttctgtccacatattctcttgctgttttattactgacaattgtagtttttaattctgtcaccacttctgttgatggtaattcttccgttgttgtatcttctgccgctctttcttccggttctgtttcgattggcgatgcttctgaattattttcatcttctgtctcttgaatcagttctgtattttcaccatcatctttctgtgtgccttgatcatccaaaaccgtttctgcctgttccacctgttctgctgacacttttaacggtattccagaaaaatctgccataaatattcccgcacataacatcaaagccatccattttcttcgcttcataccttttcctcccctgcaaataattatagagctttttttcttttcaaccggtcaaatagctttgtcttataccaaaacaacgttccaccatagcatacagcaatgcaaagccaaaattgaatatacacaataaatgttaaccatccagttgcttccgctcgtggaataaagaaaatattttgcaatgagacaagaataattgtactaagcaacgctctttttccaaaaccatataccatatatagtaaaataattcctaaaataatgctgaatataaaagctccaacatatccaaaatcgaaccatgtctccaccaaataattggatcctcgtccacgaccattcaaataatcttctttcatgctcaaataagaaagaatgtgagaaagattattgctatgaagggcattaaattcactatttgccgacgtcaagccttctgtatgaaaaattttctgtcctatacttcctctataaatatagtctataatatctccaaatgtaaaattcaaatgaggtgatagtctgattccttctcgatatccatatgctattgctgtaacgttaaatgtgactccctgaccatagaaaaaatcagcaattaatgttaaaaagtttccggttacaatctttaagccactacgtatatatgcgtatactcccataaaaataattaaagctggtgcacatatagcaaggagtcccttttcaatttttccgatccatttcttatcatctactaaataatctcgcagtaaataataagataatacaaacaagagacttaacattgccggattccgtactcctatcagcaaacttggaatcgtggaaaggacgtataagctcaatggaataaacgtttttttcttttctggtagtgtagcaagaaatacacatatactataacgtgcaaaagaggccaatgtatgaaagaaacctggcagactactggaataatttgtgtaataatccaagtaatttccagttcctattttaatcaaaggttcaaattgctcaataagataaaacaacattgttacataaaacacaatcattgaaacctttctgagattactgacaaattctgctttacaaaatatgctatctgaagaacgtgtattgttttctctgatttttatatgaaaaaactttataatgttagcaccaatataaagcgcagtctctgtaataacaatcaaagttaatgcaaaccaaatattttcctctttctgaaaactttcttcccaccattttctgcctttgcacattcctataaaaggtctgctgatttgaaatgtaaaaagtgtaagctgcatgaaaaaatataaaaaattttctttaaagttttttatactgaacaggatattcatacagaataatatcatgattgccactaatcccagattaaagagatttcccactcttgataccaaaaataacacagatcctattacaaatagtaaaatttcacatataaatataatctgctctttctgtttccatgatatcttctctttactcatttttatccctcttaatcttccttacccaaaatggcatttctataattccaattaaggttcctactccatatgctagatgcagtgatagaaatattaatggcaacatcaaataataattgtaccacttttgcctttgaacagctaacactgacattaacaaatcgacaatcacatatagtatgcataagcaaacaagcattcctgtgtttcccaacaatgctataattcctgttaaaatcagtgcaaacacaaatgccaaaggaacaaaatgatgaatagaaaagcatcccggacaaaccccaagcgtcaagccaatccaatgcccatttccatatttttgttttaacattccacaccatgaatttctaatattctgataagatataatatctggattaaaacaaattttatatcctgcttttcgaatacgataatgcatttcattatcttctgttcgtcctaaactttcattaaaaagccctgctttttcaaatacctctttgcgatatgctccatgaaaaacagacttcacatacgttttgtgatttcctttacgataaggtgcaatactacttccaaacatagaagattctgccaacaacaatgtatgtttccaaggggtttcttcttctacgacgttcggtcttctacctcctgtcacattctctccactcaatatacattgaacatttttagatacaaaatcgtgcgggatcattgtatgtgcatcaattcttaaaataatatcgccctttgatgctgtaattgctacattccatcctgctgcctgaattttcttcgcattatccaaaacaacaactcttctaaagccatgatcctcttctgaaaaatgttccattttccttctcgtttgatctgttgacattgcatttacaagaatcacctctatatttccatgtggataatcttgtgcaataatatctttgaacaacgaatcaagtgctttttcttcattatatgcaatcacgcaaaaagaaactaacatgttctctccccttgttatataaaatctgttatttaatcatataaacactttttccgataatatatccagtataccactcctgatactacatatacaaatcctgttgcaattccagctccccagattccaaattgactgattgcaaaataagtaatgattaaatgtactccacaagaaattgctgccattattgcattgaattttgcaactcctattgccggcagaaaattcattggaaccattctgattcctgcattcaacgcatatactatccaaaaaacagttgataaagcagttgcatcttcataacgacttccgtacacaattcttatgatatacggactaagcactgctcctgcaacagttatgataccaataactcctgctgtcagcataccaactttctttgaaatattccacacttcttttccatctgatgcttttgcaataatagtaaaataataaataataattgattgagtcacgaatgacaactgaccgggaatcataatagcaattttataatttgctgttattgtttcattcctcagtaattcattaacaagtgtcatctcgttgattggcataatcagtgaaaacagattagaaagcattaatgagatagacattaccataaatgcctttatctgttccggactcagcttcgccgctttctctttagaaatatttctctttagtgctgcccatacagatatgattgcaactatgatcgccacgtatctggcaaatgcaattcctttgataccaatcaataaaacaaaacatacactacatccaaatacaactgttgtctgaaccacagcagcacgtgcatacgcctcattctcgccatgtgctctcaaataactaagtactgtagccaatatattattaaaaacaggataaagcaccagtatatatacaacgctacgcgcattaggaaatggaatcgaagttaaagctatataaagtactacaatcaaagataagatagcttcaaatagagttccatatttcattgcaaattcaaaatatgctctatcttcctgttcagtatctgccgccgcacaatatttaagaatcgacgatgtcattccaagaccggcaaatgaaactacatagttatataaattatcagcatacgttaaataagcataatctgtcttgtcaactaaacgtacaattacaatacttgaaacaaaagcaatcattttcacaagtgtattacctacaaaaatgtgaaaaaagcctccttttatcaaaccatttaacttactttttattttttctcccataaacgaactggcctttcaccttttctgatattcctgtgatatacctttgtatctttccttctctttcaaagaagtaataaattgcaagtaaaaacagtacagttagtataagatcaaagctatatacaaaatcacaaaatccaccttccaacgctgttcctaatttaattgttaaaacagctccaagtgccaatgtagaaggtgtttttttaagtttcataattaataaaactacgagactcaaaataagagcaacccaaatcaccgcaaaaatcacacctttatatccccaattggcgtatgcttcacctgcaaaaagagcattcattactccggccgagccatcatacactttttctgatccataaaatgccattgtcagttttgcgcttctcaaataatcactgctattcatcccaattaatcttaaaattgtcggagtaaaactccggcctccaaggaaaccgaacactgttgggaacaaatcaaaacaatatgccagggttcccacctgtgtaaacaaagttcttccaagcggtccattataaatgtcaaaaagcgatccagaaaaacctgtatgaaaataaaatgctactataattactgccataaatgcaacagatataatcatataaatcatcttaatgccacccttataataaattaacataattataaaggctgcaaaataaaaaacaaccgatgatttttcaaatttatatgtctttataataacagaagaaataaatagagcaattgtgataattgtccattttattttctttgttttcagcatgtatgcaaatgccacataagaaagcagcggtaccatcatcagaacaaaaatgttgcttaaatatggatgtataaaataaagtcctcctattctggttctctctgtcgcaaaatcaaaatccgctgacgcatgaatcaatttcaaaagcggaatatatccaatcttcgccaaaagacctatcaacaagacgatacacccaattgaaagcaatgcaaaataaggaaaaatcaaatcttctttttcacattctatttctttctttaagtactcctgatactgtttcttcatgttgactctgaacattttctcccaaagcaaaataaatgccggtaaaataattgcaattccaaaaacaactacttctgtaatcatacagcttttatcacgatttaacagatatcccagtgtatagtgtttgtcaaatcctaataaaattaaagccgttcctgcaaatgtctgtaacatgaaaatataatatatatatgatataacatttaccttaccaggattcaacgttcctgctgctttactgaacaaaatcgttgaaatcccaaaaatcaccaatataagtaatatctccaaaatataaccctcaatcatttaaattatactgtttatccaataaatactgctttgttttttcatcaccattcttaaaattacctatcataaaatcaatctgtgatctgtcaaaatcattatccagataaattgtattaaaattatgaagattttccaacacgctaatatccgttatcttcgttcctttcatgcttagaaactcgagatccggacactgctcaattccatttaacccggaatactcattatatgaaatatttaatctttttatattcggacaactttttaaaacatcaaaatcttccaaatgattagaataaatatcgagttcttctaactgttcaagatttcccaaatatcctaattcagaaaatgcattgttccccaaatctaacagaattaaatttgtcaagccttctaactccggtgtttcagaaagcatatttgatgatgcgtacaggaaatttaactgttcaatttttgctaattgatttatattcacaagtcggttctttgaaagatcaagaaatgtcaggctcttcatcttttcgattccttcttgaatatttccgatattattttgctggataaccagtttttgtattttttccaatccgtaaattggtgaaatatctgatatctgattatttgttaatgtcaattcagttaatgaataacattttgataacgctgttatatcctttatttcatttccagataaatcaagcacctggagttcatttaacccttctattgccgaaatatcattcaacttacaatttttgattgtaagctgagtaagtttcttacacttagccagatccgcaatttctgtaatttcctgattatcttctatatctattgtccgcagactgtctaaatcctcttgcgttattttatctttttttaaaatctgttgtagttctttttctatatatttattattaaatactatatactcatcttcttttgcagtgttatggcggaatgataatcccaccataactcctgccacaagaagagctgtaattaacacagaccatattatgatcaatattggatgtcttcgttcgtattcttttagtttagtcataaatattccacaaaattgtctcataatatcttcctttcaatctgttacaagactagttcaaaaaatctttcacgcaattacatactttctctaaatcttccgcattcatatacggatgcattggcaatgcaagaactttcttacagagttcctctgaaaccgaacaatccacatacttctttgtatcagcaaatgctgtctgtaaatgcatcggcttcggataataaaccatagatggaacaccattttcttttaagtaagcctgaagcccatctctttcttcctgattcttcagctgaattgtatactgtgcccagcttgaataaaatccgttcttaacacatggtgtcttaacaatatctgacagagcttctgtatacttctttgcaacttcattaacagcttttagttcattcttttcaaatgcagtaagtttaactccaagaattgctgcctgaagtgtatcaagtcttgaattccaaccaatacgtacattgtcatacttaaactgtccttttccgtgtacacggatagactctaataattttgctgtctcatcgtcatctgtaaaaatagctccaccgtcaccataacagcctaatggttttgccgggaaaaatgatgttgtagatgcatcaccgaaactacatgcctctctgtcaccaattcttccgccaaatccctgcgcagcatcctccaacagaagaagattgttttcttttgcaattgcttcaagtttttcataatctgccggctgtccaaaaaggtctactgcaataattgcacgcggtataagttttccctcatcctttactttttgaattgcatccttcagagatgtcacatctgcattaaaactatccggatcaacatcatagaatacaggtgttgcaccttcaaatgaaactacttctgctgaagcaaaaaaagtgaaatctggaacaaaaactgcatctccttctttgatattccatgccatcatcatcatcgttaacgcatctgtaccatttccgcatgtaatacaatgttttcttccaacatatttcgcaagacgctcctctaattcttttacctgatttccgctgataaaattacaattttctaatacttcagaaattgcaacatccatttcttcttttaatacctgatattgtttctttaaatctctaaactgcatttctatttatccctctttttcacatgttccgatttactcagcattatgtattaactaattttcacattctttgccattatattcgcaaaaacccatatatttatttaaaagatcattaatgtttttttaattttaatccatcagtatgttcttcatattctcgatgacaacattcacatttcaaatcttttccaagaacatttccgcattcacatacccaaccgattctttttgccggaactcctgccattaatgcatgattttttacattctttgtaacgacagcacccgctgcgatcatagcccattttccaattgtatgaccacatacaatcgttgcatttgcacctactgttgaaccttcttttaaaagtgtcttcttatatccggcacttccttttggatatttggcacgtggtgtcaaatcattcgtaaaaaccatagaaggaccacaaaaaacgtagtcctccaattcaaccccttcataaatggatacattattctgtacttttacgccatttccaatttttacatgatttgacacattcacattctgtccaaaagaacagttttctcctatttctgatccactttgaatatgagaaaaatgccagatttttgtgccttttccgattttaacatcgtcatctatatagctgctttcatgtacaaaataatcactcattaaaattctcctgtcatatccagacttgcaaaattctccagtggaagttttacagcatgaccttctttctggctcttataaattgcaagaacaagctccagtgcatttcttcctgcatgtgcatcaacatatggtgctctgtcattcttaattgcatcaattacatctgcataaagacttgtgtgtccatttccatatacattacttgtctgctcttcaagtcctttgtttgcctgatcatcatctgtctcatcagcaaaattccatacatcaatgttatttgtagattttccaccaagcttgactgtaccattctcaccgaacagatataatgtttcctcaagattctgtggatagacatttgttgttccttcaattgttgcaactgctccatttttgaactttacaactgccattccgatgtcttctgcttcaagataatggtggaactgctgttttgttacaccataaacttcatcgatttcatttcccatcatccaacgaagaagatcaattccatgaatacactgattcataagggctccaccatcctgagcccatgttcctctccatggagcctgtgtgtaataatcctgatttctgttccaacgtacatgaatagaaccatgggaaagttttccaaatcttcctgcttcaagagcttttctcatctcctggactgcaacattaaatctattctgatgacacgcagatacttttacgcctttttcctcagacagtttaataatcttatctgcatcttcaatgctcattgccatcggtttctcgataatacagttgattccatgctcaatacagtacaaagcaatctctgcatgaagaccgctttctgttgcaataccaacaagttcgatttcattttcttcaatcatttttttgtagtctgtatatcttttaatacttgtatcattttcaagtccatgttttgcaagaacattttcgatatgttccggtacaacatcgcaggcagctacaaattcgagcttattatttacaacagcttttacatgatttgttgaaattcttccacaaccaattaatgcatatttcatctttatatcctcctacagaacttcaatattctctctgttctcgatattcttcataacattctttgtatcaaagattgcttttgcattcttctgaatcatgtcataatctacattcgtatgtgctgctgttaccatgatcaggtcgtaagaagcaatgatttccggatcaattttctcaattccctgatgtttctctccatgatatttgtactcagaaatccatggatcatagaaatcaacatctgccatctcgcgtttgagtacttcaattacacgaagagccggactttctctataatcatcaatatcctgcttgtatgcaacaccaagaacaagtacctttgctccgttcatagctttcttatgacgattcagaaccttgcttgcgcgctctacgcagtattccggcatctgatcgttaataatcatagatccttcgatcatagatgtatggaatccatactctcttgctttccatgtaaggtaatatggatcaagcgggatacagtgtccgccaagtcccggacctggatagaatgcctggaaaccatatggttttgtcttagcagcatcaataacttcccacatgctgattcccattctatcacaaagcatagtcagttcatttacaagaccaatgttgatatttctatatgtgttttcaaggatcttctccatctcagcgattgccggtgaagaaacttcatatacatcaccttcaagtacagcacggtacattgttgcaattacctctgtcgcatctttaccgattgctccaacaacctttggtgtgttttttgtcttatagatcaggttacctggatcaacacgctctggagaaaatccaagatagaaatcttctccgcattttaatcctgatccttcttcaaggattggtttgatcagttcttctgttgttcccggatatgttgtagactcaagtactaccattgttccttttgtaagatatttagaaatagcttctgttgaggcctttacatagctgatgtccggctcctgatgggaatccaatggtgtaggtacgcagatagcgataaaatcaacatcttttacaaaactaaagtctgttgttgctttcagcattccctcgtcaacaagtttcttcagatcactgtctacaacatctccgatataattatgaccttcatttacaaggtttaccttttcttcctgaacatcaaatccgattgtcttaaatccagcttttgctttctctacagcaagtggaagtcctacatatccaagacctactacaccaacttcgatttctttgttttcaattttcttcaataattgttctttcatttttcttctcctttattttaaatctaaaataacctgttttgctctggctttccatgtattagcctcgtatgccgatatttccgattctcgcttttcctgcagtaatgccgggttttgtaagatattatgcaagcattgttttaatgcttcctgattatattctatactccatcccaggttttctttttcaataaatttacctgctgctgtatctttggttgctataatcggtatataatgtcctaaatattcaaacacctttatcggcattgccatacgcatataatcaccttcacctgcaaaggcacagcatatatctgcttttttataatatggctctaatccctgtccactctcatgaataatggaaatcttttcgctcatatatggtaaatacttgctctttgcattttcccattctttttctctgcaacagacataagcatgaacctgatcaggcatctgctgcatcgcctggaaaaatactgtcaaatcatagattctgtcaattccacccacatataagatttctagtttttttgcagtcaaatccgatattgcctgcacggcatcaacatcatattccgcacatcctggcataagaattgcacttctattcaacaattccggatattcttttaagtatgcccgcatttcatctgttggaagataaaatacattaagcaattttttatattgccttaaatcatatctgtacattggaatcgaaaagcacttcttataccatgatacattatcacgatacacagaaaatttccactgtatatctctataaaaaagtccgatttttatcccgtttttcttgcaaaatttaaaaaagctaaaatctaaaaacggataacgaggcaaatgatttttttcagtcagcaaagttggcattgtagaactctctgaataaagaaaatcatattttataccgttccttatattccgttttatcttgtttatttgaacttttctttcagtgccatatcctgaaatatattcaacaagataaccattttcttcaaatgcctgtttcatcttgattggacggatattggagcccgattttccgcttttttcaatatggttggggatgtggacaatacatcttttttcttgtttaatgttcattgtcacacctcactctttcatataaattaagcattttctctacattgtcattccatgaatacagttgttccactcgttgacgtccattatttcccatctttgtgcgcatcttttcatcaagcacaagtctcttcaatgcatcttttgccttatttatttcttttcgagaaataatcaatcctgtttttccgtcttctataacttctttaaatccatctgcatccgatgcaacaacgggctttttcatcgccatggcttctactgctgctactccaaaactctctttccggcttaatgcacaaaaaatatcaaatttgcttattgcttccggcaccttcgtgttaggtattttccctttcaggaaaacagaatcctgcaggttctgcttattgatcagatcttcatactgttcttttttgcttcccgaaccataaattaataatttaatcttccttgagtaatgctcctgttccaattcctttttcagatcccgaaatgcaagaatcatttcttcgataccataaatttcttctaaagcttttatattccctattatcagctcttctttttctatttctttatactttttcggatcaaacttatttaaatccactccaaatggggtaatcgtaatttccagtttttcatcctgcattacttttttcagttggacagccatacaattacttgttgaggccaaataagaagcacttctcacatttctttttaaaatatgatttttcaccctgctttcatatgggaaatcatatacatcacttccccatactgaaagaatatatttaggtaatcgtgctttcctcgccaatgtcccataaccgcttgcataatgtacgttaatgacatccggatttattcttttggcaatttttctcaattcaccggcatttagataatagcctttgccaccactgtgtttcatcaagtataattttactctcgaattcagtgcatcttctttcggctcatggcctctgtttgaaacaagatacacttcatgtcctctctctgctaatgcattcacccatctaacagtgtgcgtactatttgctgccgatacaaacattattttcatcaaaatgactcctctgttttactatctcgcttctcttcaaaacaaacttatcgttttgaactatcaattgccttttttaaaatccgctcaattttatttgtcagtatctgataatcatactcttgtgcgcattcttttaaacgttggcaatactctccgtattcttctgaagtaagttgacgaaactttgtaatctcttccgcatattcttttccattcgcaaatcgctttgcaattcctaattttttctctcttattaaatcataattcaccggaagattacataaaatcggcttttcactcgccatatactcaaacagtttattccaactgcatccgtatttatttaagcctgccccctgaacattaattatgttcaaatcagcattgctcagaatatacggaatatatttcttttctacacgcccttcaaatttaacattcaatgaatactttctgcactcatcttcaagcatgtctttttctgtgccatctccataaatataaaaatgaatatcctgatttttcaattcttttgcagcatcaaccaatgtctgaagattatttacttttcgaatagatcccatgtaaactactttaaatgcattatcattcgcaatctggctattctcaaggttatataattttttattctcttcaaattctgctaaatcgacaccattatttacgtgatttactttattgatattaacttttttcgtccagcccttatcgcatatgtactcttttccgcccgacattgtaaaaatcaattgatctgcgtgtacgtaaatccatttttcaagctgatacagtacttgaataattggattcattcgagacataccattatattctacaatcgactccggccataaatctcgtacttccacaacaactggtattttatgctttctaccaaataataatgcaaataatgcaacaaataaatctggagaagatgtataaatcacatctggcttttctttcttataaaaccgcttcattgccttccaggttttaaatggaagatccatcatattgataactctgtccattccatttcctttataatcacggcttctaacaaaggtatactctacaccatcttccatctcttctctataaagagatttatccctgatcatattaatatctgtattatgaatcttactggatgtaaagattttcaccgaatgtcccttcttctgaaggtactttgaaaaataataatgcctcaccaatccccccatactcggtggaatggcgtaatgattcacaatccatacgttcattgtgagttctccttcatacctttgttattttataactgctattactgttgctaacatcgtcttgatatcttgccagaaactaaattcttcaattgctttcaaattatatttcatcttttctggcagaatctgttcgatataaacctgatctgcattctctgctgattcaagaagcttgtcttcatctttatattcaatactcgcccttgatgttactcctgctggcaataacagtgtcgccttcatttcatctgtataatgggctacatacttttcaacttctggtctggtgcctacaaaagtcatatctccagataatatgttgagcaactgcggtagttcatctaatctgcatccgcgtaatgcttttcctacttttgttattctggtatcacctttcgtggtaacctgcgttccgattttatctgcgttgttaaccatcgtacggaatttaaaaatccgaaaagtcttaccgtatgtcgtcactcttacttgtcgaaagaaaaccggacctttagaatccagtttaatgcaaactgctagtatcaaaagcagtggtgataaaagcacaagcaacacacctgctactattatatcaaaaagacgcttcagaatcaaacttgctttatgccgctgcaaaatatcataatatctttttacttctttcacttgcatattctgaggcaattcgtcccatctgcacatcttttaaacctcacttacacatttcctaaatgtttcaatcacatactctacatcctcatctgtcagttttgtatggagtggtaaagtaatctcgttttcaaatagtgcataagcattcggataatctttgatatcaaatccaagatttttgtatgctgtcaaaagtggaagcggtttgtaatgaacatttgttgcaacgcctgcttcagccatctttgtaattactgcattgcattcttctcttgtctttccatttaatctgacaagatacaaatgaccacttgacgcaaaatcatccccataatggttcaatacactaagatctagatctttcaatccttcattgtatttttctataatttcttttcttcttgccaaaatcgatgggtatcttctcaactgtacaagtccaagagatgccataatatctgtcatattgcatttataatacggcgcaataatgtcatactcccacgctcccagctgtgtcttagccaaagcatctttagactgaccatgcagagaaagaagcataaactgtttgtaaatttcttcattatctattccgtcaatatctctccagactgctgctccgccttctgctgttgtaagattctttactgcatgaaaagaaaagcttgtaaaatctgcaatttctccactatgctttccattttttgtagcaccaaatgcatgcgcaccatcggctactaccgctattcttcccatctttttctgtatctctgtgctcggacggaataatgactttttcttttctacaatgtcgtatatcttgtcgtaatcacaaatcacccctccaagatcaaccggaatgattgcctttgttttctctgtaattgcagattccagcttttcataatccatctcataagaatccggctgagtatctactaatacaagtgttgcacctacatgtactgcaacacttgctgatgcagtatacgtatacgcacttgtaatcacttcatcccccggaccaattccaagaacacgtaaactcatctctgcacatgctgtagctgagttaagacaaaccgccttactcgtatggcaaaatgctgctatttcgttttcgaatttctttgtcttaggtcctgtagttatccatccacttcttaaagtatctgcaacctctgcaatctcttcctccgtaatatccggtggtgaaaatgctatatgtctgttttccatctatctatcctccacaactggttcttcgtgactcgcttttccaagacttaataattcttcatacatctcttcatcacgttctttatcttcttctctgatatgatacgtcgaaacaattccagatacgatttttttcacatcccttgattcctctgatgcagcaatttcgagttttttcaactcgcttaagaaatgtacctcatcaaattctaacggttgtcccacataaatcagattatttgccgtcttctgtaaaccttcctcttttgttagaatctcctcatacaatttttctcctggtcgaagtcctgtatactcaatattcatatccacaccaagagtataacctgacaaacgaattaaattcttggcaagatcagcaattttaactggctcacccatatcaagcacgaagatttctcctccatgagccaatgcgcctgcctgcattaccaatgatacagcttccggaattgtcataaagaaacggataatatccggatgtgtaactgtcacaggacctccggctgccatctgtttcttaaacaatggaataacactaccattacttccaagcacatttccaaaacgcacagcaacaaattccgtcttggaatatctactgaatgtctgaatgatcatctcacataatctcttggacgcccccataatgtttgttggattaacagccttatctgtagaaatcagtacaaatttcttgaccccatacttatccgccgcacgtgctgtcttataagttccaaaaacattatttttaattgcttcattcggactgtcctccatcagcgggacatgcttatgtgcagctgcatgatacactacatctggtcgataaagatccatcacactttcaattctctttgtattacgaactgaaccaataagcacttctaatctaagttttggatatttcttttttaattcttgctgtatatcatatgcattattttcatatatatcaaaaataataagcattctcggattatgtgcagcaatctgtcggcagagttcgcttccgatagagccaccacctcccgttacaagaacactcttgcctctcacatatccggcaatactgtcaatatcaatcttcacagtatctcttcccagcaaatcctcaatagaaacttctcttaattttgagacacttacctcatcattgatcagctgatacacgcctggaagtaccttcagcttacaggttgtttcattacaaatacgcaggatatctctggtgtctttattatcagcagatggaattgcaagcataatctcatctacatcatattttttcgcagcctctttaattttcgtacgatcgccgacaatgcgtactccgcgaatatattttccggtttttgatggattgtcatcaattacacacacaacatttctgtttaaatgtttgcttgttttcatctcagtgattattatattaccggcttcgcctgctccgatcaccattgtattgattggacgatttgtgttctttgagatacctctttgaagagcatgcaaaatacgataagaaaatcttgtgatcaaagttgtcattgtcaagaaaaagaaatagaacaaatgaaaacttcttggcactgtcagataaagcagactcattccaaatgcctgaaatgctgttgataaaattgccgctgcacaaacaagtagcgcctcataaagacttgcatatgaccagactctattatataaattcaataaaagaaagatgatcattgtagtaactatattaatcaacaaatacgtattaacacttgccaaatcttccacaggaaccgtgttcccatccattttatatctaacaatcaacgctaggtaagaatccactataattgtaatgacatctacaataaatagtaatatcattcttgattttgatgtttttaagctgaatatatttttcatagaaatcctctccattaacaatgttacaaattattacaagttttttacataacttatatattatcaaatttcattccattattcaatgtctatacttatttttttcataaattgtgcaggttttatatttctctgcattacgtttttgaaatcattaccaatcaactttaaaaaaggagacgcttcttactatttctgcgcctcctctacccattcttaatttaatttttctccttcggtcaatatgccgccttcttcaacaacattcaccaaatcaataatattctgcacagaagattcaatcggttccataataaagagttctgtatctccactggaataacaagtaccttttgtattcgttccttctgctgctatagactggattgtccatgttgcattattattcaactgatacttgatcagagcattgatctgttcctgagacatatttgtctcaacatctttgctgacctgttccataattgcatttgccttcaaaagcattgtaggcgacagacacttctttagcattgcagtaataaccgcctgctgattttttcctctctgattgtctccatcaggaagattgtgtctttccctgcaaaatgcaagagcttctttaccattaaaatgattatacccttcctgaacatccatagtatattctgaatctttacttgtcgtaaatgcaaattcagaatatacatcaattccgccaagcgtatcaacaatatcaattaatgaagtgaaatttaatcttgcataataattaatatctgtctcatataattcacccaaagttttcatagatgcatctataccatagattcccgcatgtgttaacttatctctctgtcctcctgaaactcccggaataggaacataataatcacgcggtgttgttacaagtaatatctgatgtgtttgtggatttacaactgcaataatattcacgtcacttcgacttgtttctgatacatcaccataaacatcaataccactgatataaactgtaaatggttcttttataatactgtcatctgttgctcctgttgaatttccgaaatccaactcaacacgtatattaaatgtatacaacactttcactttatcgctataaccatctactgcttcttccatcagacttgtatatgcactgttataaatgattgcatcacaatccccatcaatcaaagcctgtgcttgtgtctggacagaatcatactcttttacttcgatcgtatcaacgccaatctgcttttcaatatcggtcacagctgtctgtatattgccagcacctttctcaaactgtacaccatacgtatagtctgccgcatcttctattgtctctgccgaatcatctgctcgcactgcaacaaccatcttatctactttatagttgctgcctgtgatctttccaatcatattattagcctgagcgacataataacttcctgtaaacatcacaacagccataagtaaactgaacacttttcccaaagtcccccgttttctccttgccacctgtgaattcagtgtcacacaccataagaaaaacagtattgctgctaccagtatcagatacttatccggaatcattcctaacaaatacaataccgccattaaggctatactggcaatcgtctgaagaatgatacacaaagttcccagcttattacttcccgatctgcgggaatacttatctgtacttttctttctgcgtgcagaattgccagcagattcttttcgttttgccatcttacatcccttttctcaaattagaacaattttgacgggtaaactcctttttcgatcaatccacgaagtgctgctgttacagattctttatcttccttatatgtcaccccaaaccactggtcatgtgactgcagtacttttacttccagtttcccatcacttaacagatctccaatcattgtcggaagcagatattctgcttttagatctgtactttctgttttctcaagaaactcatcaaatcctgtcttaagaatctcgaaaaattcaggtgtaattccccacatattcatagataccggtgaatcaacgtcaaggaatacatctccatcctctttgtggattacagcttttccgtcttctttttcgatgttatgtgtctcttcaatgtctgcaagcatgccatgtccgtctacttcgcacacacctctggtcacgcctccgttatcactcaatgtatttttcaatacaaagctgaccatacaaatctgcattatatcagcagatggaaggtttgtcaaataactgtatgcctctttaaatgcttcttttccataataatcatctgcattgattacaaggaatggagcatccaccacatctttacagcaaagaattgcctgacctgttccccaaggttttgttcttcctgtgaattttccgctgaatttttccggaatatcatcaagctcttgaaatgcatatgctacttctacttcttttttaatacggttgccaatgatctctttgaaatctttctcgagatctttgcggataacgaatacaactttgtcaaaccctgcttctaatgcatcatagatggagtagtccatgataatctctccatttggtccaatcggagccagctgcttgattccgcctccaaaacgacttccaatgcctgccgccatgattactaatgttgctttgctcatttctttttcctcctaatgtctcttcactgttacaatataccggtttataaacactacttattctcccaatccatctttcacaagttgaaccatgtctgaaagtgctgtttcttcatcttctccttcacaaataattgtaatctcatctccgctttttatgcatgcacccagtacacttaatacacttttggcatttgcattcacttcttcatttttcattttcttgtacactgtgatcttgctcttgtactgcattgcagttttacaaaacaatcctgccggtcttaaatgaagtcctgtcggatttttgatcactactttatcgcttatcatattattctcctattctatctctttgatagtttgaagttttaacttcaacatcatataatatgcattgaaaactgtcaatgccggccatcttaattcttttttaatttagacctgtaattcacaaaacaatataaagtatcactaatttgtctcagagttattttccggttgttcatcttctgtggattctttttcagtcaatacaagctgcactgacactggttttgtcaatgtcactccatctggaagatctacttctaccggtatatcataagtaccttccttcgtgtaattctgtaggtttaccgatactgcattactgatatccagactatccagcgtatctttctctccctgaaatacaagtgtcacctcagcatctggctcataactcacctgaagattttttgccagataattctgtttgatggatgcaaccataaactcaattgtacgatttcccaactgttcgatcattgcagttgcggtaacctttcccgaagcgccttcaataagttctacaccttccggcagataatctgtaatgtcgaatgctttctctatcttttctgttgccccatcaatagacaattcagatgctggaatattgatactttcaatctgggataaagcctcttcttttccgcagacctgcacgctcgctggttcgctcgaacaacccagatattcatatccatctgccggtgttccagatgcttcaaatttcaacggaaccgtcttgatcctcatcactgtcacatctacagtgattccatcttctccaagattattacttagctgtccctgattgatcacatttccagatgcatcatataaaacaagttctgctgtaagttcttcatctttcgaaattccatctacattaatcttcgctacagccttatcaattgattttactgtggattctgctcctgtaatcgttattttttccggattaactttcatctctccaatctgataaccgtcacgctgcgttccggttgtgctaacagtcaatgtaaatacattcttacctgtcggttctgtcttaatctgtatgtttctcggaacagactctgccgactgataagatccactatactttggaattgatactgaaattggtatcaaccctgtcctggaatccatttctttaatatccgcagtagccacaatatcatctgacttaatctgttgaatcactgaacgttttgcataaacaactacgtttacattctgatcatctaaaaccgtataaacttccccaccctgtgcaatcacatcatcgttcgctatcgtaactttgatgtttgtataggttgatttcgtaaccggattagcaacattcgcaacaatcagccaaagaaatgctgcaaaaacaaatgcaataatcttaagcggaagattcgttgttaatttgtattttttcatgatctgtgccatcctttccgtatagaaaacttgttctttgtctctgtctttctatactgaatctggcttaactgactccgaagttcttctgcgttaatagctcgaagcaatcgtcctccggaagccacagaaacaagtcccgtttcttctgaaacaacaatcacaagagcatcgcaaacctcgctcattcccaatgcagcacgatgccttgttcccagatctttactgattgtcatgttatctgaaagtggcagatagcatgttgctgatgtaattctgtcccctctgataatgaccgcgccgtcatgaagtggggtgttgtgttcaaaaatattgatcagcacctgagaagacactttacaatcaagctctatacctgtcatttcatactctgttaactgaatcacctgctctaccacgatcagtgctcctgtacatacgcttcccatggcataacaagctcttacaatactatccagtgtttcatccgaaaacctctgattttctttatttttatcgaacggattaatgttactaaataaattcttctctcccagcttctccaatgcccgtctaagttctggctgaaaaacaacaattgctgcaatcgctaatacattaattgactcttttgccagatacaggatcgtattcatttgaaaaagccatgccagaagaataaatccccccagcataagcattcctcgcagaagcatccaggcttttgtgttcttgatccagagcatgatttcatagacaataatcgtcacaatcagaatctctatgatatcttttatctgtatatgtggaaaatacattccatttgaataatttcttataaaattctgaatccactctatcatctcaagtctcaccaccttatgtaatcactcgttgttatgcactcttgcatcttttgctctgtcgatcactcttttttctcttcattctgatccagacccagttccttgctcagacttcttgttaaaagaatatcttccgtcatgtttgaatcattaaaaattgttgtttgtgcaagatcagactcctttttcagttgttctgactgattttcttcctctttctgttcaacttccttcaaatcagaaacttctgacacagcagtattattttctgtctctgacacattcggcatctctgcgtcctgttcctgatgttctgtaatatgttttacctgcttctcaggcatctgaaccactactttcggaactgcctttacataataatagtattcgtcatcttcaaactgaacattctctgttcttgaataatccacagagaaaaaaaacacttcaaggaacaatcctgctacaacaccaagaattccactgaagatcatcatcgtataaggcatatgaagtcccaaagagatatttcctgatgcgcctatgattatacaaactgctgtacctgttgctgatgctatcttccaggaatgatcgactgcccgatttttaattccgttcactaccagtattccgatcactactgcaaacagcataacccacatctcttgatagcctacaaactgttttgtaaaattggttaaagtgctgatcattgttgttccatctgtacctttcaatgctgttgcagaagctttgatcaggtaaagcagataataaacaaggattccgcaggatgcagggacaatccatactgtagtacctaacagcccaaatataaccggaatcaccagtggtattttcatgccgaacgctactaccgtcagcagaatcagccagctcttctccggggtaaatcgaaagtagaaaatatacattaacaaaaacagtatcaccgtaactccggctattggcatagataatgtatataaatgagccactattaacacagttgctgctgccgtcattactgccagagggagaaatgtacagactactgctaagccaacagtacaaagaacagatgatgccatcttcataaatccaatattagaattgatcaggttaaacaccaaaagtgcaagcaaaaactgtgctccctttcgaactaagagagagtgagaaacataaatctgcttaaatctttctctaagaaccagtaaattgttcattgttcattcttctcctttttacacatcttctctaaacgggacaaattacgataataacgttttacattctgtttggcaactgcatgttttctcttataaaaactatttgcgcaaaccccatatataaccaaaagaactatatagcctgcaattgctgcaatcaagagaacgaatagttttaaaattgtcagatcagcagataaactatcacttgaataaatgcagaaactaacgaacaaaactgcataacctattgttacccagatcaatgtaatccacgtcttaagacttgcataatcttttctgtaataatcggcaattttaaaatcatctttgtgattcttcccatatatcgacatttttgtcattaaacgaatcctgtctttatctaacatatccgacattcacctttccagttttctctcctaagtataccatatgttcagataccttgtccaatgcttagagtcaaaaagtagacattttcaacacctgcttttttcaggattcctgcagcacgttctattgtacttccggttgtgtaaatatcatcaatcagtagaatgttctggcgtggattccacgattttgaaaccgcaaatgcccccttcagatttctgtgtctctgctccccgttcatttcctttaaaggccgggttttcttaatccgatataaaacatccttttccataggaattcccatgcattctgataactgctttgctaaaagttctgcctgattatatcctcgttttctcattttcgatctatgtaatggaattggaataattgcctggatcccccatcttcgaatctgaaattcaaactcatctgccagctctttcccaaagatttccgcatagtatcgcttgttgtgatatttcaaccgatatactgaattcgaaaccggcggaatgtgaacccataggctgcgtccttgttcataattactttttcttctttcacaatccctgcaatactctttcgtttcatcctccaatggctttccgcaatggatacattttatttctcccaccttaacaacctgttttctacagtcatcgcaaataccttttgagctgattccctgacaaaacgggcatctttttggatacattttttctaaaattctttgattcgctcgtctaagcttgtaaatcttccctgttcgcttttgttttcgatcatttcctgaaatgttagttcactccctactattgttaaacatttttttgcccgcgtcactgctgtataaagcagattcctgttatatagtaactttggtcctggaagaagtgggataatgaccgccggatactcgcttccctgagatttatgaaccgtaatcgcataggcaagttctaactcatctgtcatatcgtatccatattttacctttctcccctcatcatattccacgataacagtttctgtatattcattgatttcatcaatgactcccatatcaccgttaaaaactccaattcctttgtcaactgttaatccaaatctggtagaaacttcccactctaattgataattatttttaatctgcattactttgtcaccttcacggaacaatctaccattaatttctttctccgttttttgggaatctgaaggattcagatattgctgtagaatcacattcaatcgttctacacccagcaatcccttacgtgttggcgtcattacctggatttcatttgggtcagcctgcacatatctgggtaatttcttctgtattaaagtaataacgacgctaatgatcgtattcgcatcctggcgttttaagaagaagaaatcccggcttttattatcaattgtaaccggttctcctgcattgatcttatgagcatttactacaatatcactctctcctgcctgacgaaaaatctttgtaagcgtcactacgtgaaatttttctgagcgtatgatatcttttaacacacttcccggtcccacggacggaagctgatccacatctcccacaagaataagtcttgttcccggaataactgctgataaaagcgcatgcatcagattcaaatcaaccatggacatctcatctataatgataacatctgtctcaagtggattctctctgtttctcaaaaatccacctacactgttctcttcctcaggatttccacttacttcaagtagtctgtgaatcgtctgggcttcatatcctgtagcctctgtcattcgctttgccgcgcgtcctgttggcgctgcaagaaggatactcattccttcgctttcaaaaaattgaatcatcgtattgatcgttgtcgtcttacctgtacccggtcctcctgttaatatgagcaaaccatgtttaatagcttctataacagctctgtgctgcattggatccaattctatcttttctttctgttctactcttttcagacgtttctccatcatgtcttccggcatctgacagtcaatatcaagatcattaagcattttcgcagtattcaattccaagtaataataatgtgctggataaatgcgaatttcctcatccacttctttcataactgttttccgctctatacacagatccatgatgtacttctcaatatcttcaagatcaactcctaaaagtgcatttgcccttcgaagcaatatattctgtggtaaatacacatgcccctcacctactgcctgttgcaatgtataaaataaaccacttcgtatacgatagtctgaatctgtatgtatgccaatcttggatgcaatttcatccgcagtcttaaatccgattccttcaatattatctgcaagctgatacggattttcttccagcactttatacactttcattccgtaatactgataaatcttagctgccaactttgtggaaataccgtacttctgcagataaatcatggcttttcgcatatctttcttttcttcaagctgagatgcaatctcctgtgcttttctctcactgattcctttgatctccgcaagtctttccggctcttcttcaataatgcggaaagtatcctctttaaactttttcacgattcggccagccagtgccgcacccacacctttcactgctccggagccaagatatcgttcaatagaaacaatatcctccggctcttttactttataatgagaaatcttcaactgcttaccataaacattatgattcacatattctccttgaatttcaagaagctctccttcattaatatagttcagacttcccacgcatgtcacttcaccatcttcatgttcaatatggaatactgtatacccattatcagaatttctatatacaatatgactcacataccctgtaactgtttccacactttttcctctctcttcttgtatcttttcctatttatatgcagaaaaagggtgtgttcctattatacacaccccttgtaattgaatcttcttctctaagaacctgacacttcaaattcgtttttcagaattctttctcttaaaactcttttcttccactcataaattccacaaactgtccggtaccaattgcaacgactttcatcggatcctccgctgtcatcgtattaattcctgttctctcttcgatcaattcttccaatccgcgaagaagtgctcctcctccggtaagaacaattccacgatcaaggatatctgccgacaactctggcggagtctgctcaagtactccgattacagcttctacaatctgtccggtagattctctcaaagcttcttctgtctcagatgaagtcaccgtaactgtcttcggaagccctgttaccagattacgccctctgacttccatcttctcttcttctacaagtggataagtcgttccaatcttaatcttgatatcttctgccgttctttctccaatcagaagattgtgtttctttctcatatagcgtacgattgcttcatcgaaatcatcacccgctatcttaattgatgtattcacaactgttccacccagcgaaataactgcaatatctgctgtaccgccaccgatatcaacaatcatatttccacaaggctttgaaatatctatccctgctcctattgctgctgccacaggttcttcaatcagatgaacttctcttgctccggctgcaaatgtagcctcttccactgcttttttttctacttctgtaacaccacttggtacacagatactgattctcggcttcttaaatgtacgttttcccaaagctttctgaacaaaatacttaatcatcttctccgtcacggtataatcagagattactccttgtctgagtggtcttaccgcaataatatttcccggtgttcttccaagcatcagacgcgcttcttcaccaattgccttgatcacattcgtatcacgatcaaatgcgacaactgatggttctttcagaacaaccccttttcctttcacatataccagtacactggctgtccccaaatctattccaagatctactgacatcataatttctatatctcccttctaaaacgctcttttactgttctcagcaatctactgcaaataaacaacattgtcggttactgattccagcattctctttcctcaatcaagtgtcttttgtcccttgaaggggtttatcgttactgtttttttcactcttactgttgtcaatattatgtaaccaaaacagtaatgttttatcatccgcatactttagtataatagacttcgcttaaaatagaaaggcattttttgcatatattttacgacttttttcgactttttttcgtctttatttctccaatatagacgcaatatatttccctgtataagaatctggattctttgcgacctcttccggagtaccacttgccacaacagttcctccgcggtctcctccttctggtccaatgtcaataatatagtctgccgtcttaatcacatccagattatgttcgattacaattactgtatttccatccccggaaagtctgcggagaatctctgttaatttatgcacgtctgcaaaatgaagtcctgtcgtaggttcatccagaatatataccgtttttccggtactgcgtttgctaagttctgtcgcaagtttaattctctgtgcctcgccacctgaaagctctgtagaaggctgtcccaaacgaatatacgacaatccgacatctctcaacgtctccatctttcttcgaatacttggcacgttttcgaagaaatctaccgcttcttccactgtcatattcaatacatcataaatatttttccctttatagcgtacttccagagtctcacgattgtaacgctttccaccacagacctcacatggaacataaacatccggaagaaaatgcatctcgattttcaggattccgtctcctgcacatgcttcgcaacgtccccctttaacattaaagctaaaccgtcctttcttgtatccacgtgcttttgcatccggcgttcctgcaaacaaatctcggatcaaatcaaacacgcctgtataagtggcaggatttgaccgtggcgtccttccgattggtgactggtcgatattaatcactttgtcaacctgctctagcccttctattctcttatgttttccagggattgttcttgctcggttcaagtctcttgcaagtcttttatataaaatctgattcacaagagaacttttccccgatccagacactcccgttacacaagtcataactcccaaagggaattttacatcaatgttcttgagattattctcttgtgcaccgactactttcagataacctgtcggcttctttctttctgtcggaaccggaatcttgatttttccactcaaatacgctcctgtgacagaatttggatttttcataatttcctgtgcatttcccacagcaacaacctgaccgccatgttctcctgcccccggaccgatatctactatataatccgctgccagcatcgtatcttcatcatgttctactacaatcaatgaatttccaagatcacgcaaatgtttcagcgtcgcaagaagtttatcattatctctttgatgaagtccgatactcggctcatccagaatatatgcaactccgaccagacctgatccaatctgtgttgcaagtcgaatcctctgtgcttctccaccggaaagtgttcctgtcgcacgcgcaagcgtcagataatccagaccgacatccatcaaaaaactgattcttgctttgatctctttcagaatctgattaccaatcaactgctgtgtctctgtcaattgaagttcatctaaaaatttctgaagacgttctatagaaagtgttgtcacttctgaaatattcttatctccaactgttacagctaaagccccctgcttcaagcgctgtcctttacaggctgaacatggtgtaatattcataaatgtctcatattctgctttcatcgtctgagaacctgtctcacggtaacgacgttccacattcttgatcaatccttcaaatgcaaccggataaatcccttcgcctctctgacctttataataaaccttcacttcttttccatctgttccataaatcaaaacatcatggatttctttcggatagtcctcaaaaggggtgtccagatcaaaatgatattctttacacagtgcatccagaattgcacgtgtgaagctgctcttgtctgtacaggactgccatcctaaaactgcaatcgcaccttgattaatagacaacgacggatccggaatcatcaattcttctgaaaattccattttgtatccaagtccaaaacattccgggcaagcaccaaatggattgttaaaagaaaaactgcgtggttcaatctcatcaatactgatttcgcagacaggacatgaaaagctctggctgaaattcagagattctccatcgatcacgtcaacaacaagcagaccttctgcgagctcaagtacattttcgacagaatctgtcagtcgtttttcaattccaggttttactacaagacgatctacaataatctcaatattatgcttgatattcttatctaatgtaatttcttctgaaagctcatacatattgccatccacacgaacacgaacatatccactcttttttgcacgttcgaaaagctttgcatgtgttccttttcttccacgtacaacaggtgccaaaagctgtatcttcgttctctccggaagcgccataatctgatccaccatctgatctaccgactgttttgcaatctcacggccacatttcgggcaatgcggaattccaactctcgcatataataatcgaaaataatcataaatctccgtaacagttccaactgtggaacgtggattgtggttcgttgatttctgatcaatggaaattgcaggtgaaagcccttcgatactttctacatccggtttctccatctgaccaagaaactgtcttgcataggaagacagtgattccatataacgtctctgtccttctgcataaattgtatcaaatgcaagggaagattttccagaaccgctaagtccggtcaaaacaaccagttcatttcttgggatatctacatctatattcttcaggttattttcattcgcgcctcgtatcttaatgtactgtctggcgtccattttcttacccattttgtaatctcctattccatatcattgagcatcttttttaattcaacaagcttatcacgaagctctgccgctgcctcaaagttcaattccgctgctgccttcttcatctgtttcgtcagatccgcgatcagtttctccagttctttctggctcatggactccggatctttttcaagccgcatctcttctgccgcaacctttttagagatactgatcagatcacgcactgacttctgaatcgtcttcggcgtgattccatgctcttcattgtatctcatctgaatctcacgacgacgctgtgtctcatcgatcgccagctgcattgattctgtaatcttatctgcatacatgattacatgtccttctgcattacgcgctgcacgaccgattgtctgaatcagcgaagtctctgaacgaaggaatccttctttatctgcatcaaggattgcaacaagagtgatttccggaatatcaagtccttctctcaagaggttgatcccaaccaacacatcaaacacatccagacgcatatctcggatgatctccgtacgttcaagcgtatcaatatccgaatgaagatattttacacggattcctacttcacgcatataatctgtcaaatcttctgccatgcgctttgtcagcgttgtgacaaggactttattcttcttactgatctctttgttcacttcaccgatcagatcatcaatctgtccttctaccggtcgcacttcaacttccggatcaagaagtcctgtcgggcggattacctgttctgctcgaagaagttcatgatccttctcatattctcccggtgttgcagatacaaacatcacctgattaatcttactttcaaactcatcaaaattaagcggtcggttatccttcgcagatggcaggcggaatccataatctaccaatgtctgctttctcgactggtctccgtgatacattccaccaatctgcgggattgtcttatgtgactcatcaatcatcataataaaatcatccgggaaataatcgatcaatgtatacggagcctgtcccggtcgaagccctgccaaatgtctggaataattctcaattccggaacaaaatccagtctccttaagcatctcaatatcaaaattcgttcgctccgcaatacgctgtgcctctaaaagcttgtcatttctcttaaactctttgacacgttcttctaattcttcttcaatatctgccaccgcacgtttgatattctcacggtcaaccacataatgagatgccggaaagattgctacatgtttcagttcgtccttcacttctcctgtcaaaatatcaatctctgagatcctgtctatctcgtctccaaagaattccacacgaatcgctgtgtcactctcataagcaggaataatttccaaaacatctccacgcacacgaaatgtaccacggtggaaatccatatcattacgatcatactggatctcaatcagctttgccattacttcatcacgatctttgatcataccaggacgcaaagaaactaccatgttctggtaatctaccgggttacccagtccataaatacaagacacactggcaacaataatcacatctcgcctctccatcagtgacatagttgcggaaagtcgaagcttatcgatctcatcattgatggatgaatccttggcaatgtatgtgtccgaagatggaacatatgcttccggctgataatagtcgtagtaggagacaaaatattccactgcattatttggaaagaactctttgaattccccatacagctgcgcagccagtgttttattatgtgcaataatcaatgtcggcttgttcatctgttgaatgacattcgccatggtaaatgtcttaccagatccagtaacgccaagcaacgtctgacactggtttccttctttgaagccttcgaccagctctttaattgcctgcggctggtcgccagttgggttgtattgtgatactaattcaaaatgatccatgtaatttctcctgagcgctctaatttagcggtgatattttagaaatagtagttgttttcttagtattgttacttgtatagtatatcattcaggagaaaaaaagtacagaactaaatcgaatgtttgttctgtacttttacatcttagctcgattctacatacctttaaaatgtatctgaatttaaagtcaaattttttatttcgttgacagaataaacttttaagatatataatatttttattacatttgtaagatttggaggaatatcacatgagcaatctgcctcaaatttcagaagctgaatttgaagttatgaaaatcgtttggaaatacgcaccaatcagcaccaatgaaattactgaaaaattaacacaaatttccagttggagtcctaaaacaattcagacattgattaaacgtctcgtttctaaaaaagcactaacctatgaaaaacaaagccgggtttttgtctatactccattggtcaaggaagacgaatatattcggcaggaaagtaattcttttttaaagcgatattataatggtaatatcacttctatgcttgcctcttacattgaggatgataaattgtctgaagaagacattgccagcttacgggatcttctttccaatcattaaccatgggaggagcatattttgatatattttagttttcgatttttactctgtaatgccatcatttgtatttttttaggtagtttactgggattaaaaaatttattgcaaaggcaattatccgcacgtatgcaatataatctttcgattatatttcttgccgttctaattgttccctttttaccgataaactctgccccatcttctatatcgtggagacatttgctgacagccagttcaagtaccaatggtgacattcaaaccacttttctttctggtaatggttacaatttggataaaataaatgattttgctgtctctgtcagcacccaaataccaacttttattcacacattacttgtatttttctggagtatcggtatattcataatgttttttcttctctaccgctcagtaaaacaagtaaaagccttacatagttctgctttacctcttcaaaatgaagaactcaacgctctttatatagaatgtttaaacgaagtgaacagcaagcataccattccgatttatagtacagcatttttgaaatctcctgttttggctggtttcctgcatcctcgcatttatcttccaattcacttgatttcagattttaacgctggaactataagcgcaactgatattcgatatatgcttcttcatgaactgcagcactacaagcataaagatattctaattggatatttgataaatacagtaaatgttttctactggttcaatcccctaatctggtattttctaaaaaaaatacgtcaggaacgggaacttgcctgcgacagtgctgtattacaattattgaaagaaacagaatacaagtcatatggaaatacactgattaactttgccgaaacaatagctctgtctccattcccttttactatgggaatcagtggaaatataaaacagttaaaaggacgcattttaaatattgcatcattccaccaacctacttttaaacaaaaaattcgtggatatcttatatgcatattcgtctctactatcatcattggatgcattcccatactttctgtttatgcttctgatcagactggctatcattttgacacaaccgaaaagaatattactcagctaaatctttcttccgattttggggactacaccggaagttttgttttatatgatcagtctgctgataaatggaatatttataatatggatcatgcttccacacgtgtatcaccgaattcgacttataaaatatatgatgcattacttggcttggaatctggaattattacaccagaacattccactttcacatggaatggagagccatatccttttaattcctgggaagccgatcaagatttaacctcggctatacataattccgtaaactggtattttcaggcaattgattcacaggcaggttttgaagccgtaagaacatttttacagacaataaactatgggaatcagaatactggaacaaatctaaatctctattggacagatttctctctgaagatatcacctatagaacaggtggaattgttacagaatttctatcaaaataattttcattttgacagtaaaaatatccaggcaataaaaaaagctctgctgctttccactacttcttccggttctctttacgggaaaacaggaaccgggcgtgtcaatggtaaagatgtcaatggttggtttatcggatacattgaaacagcgaataatacttactacttcgcaacaaatattcaatcctcttctggtgcaactggaagtcaggctaccgaaataacagaatctgtactttctaatcttggtatttggaaataaataaagagaactgatagcataatttcccgttatcagttctctttatttcattcttctctactgatcaattctgcaaattacctaaccggtactgatacctcggtatattatcaataccattatctaaaatcctgtttccaacatactgaatcgttccatcatcctgaattttcatcgtaagttcgtgtgtaataacaacatcattacatacaacagaatcacatactgcatgaattgtcaaaacaatggttccatcttcattgtgcctgacttctgttacttccggtaaagacaagccaaaatgtgttggtgaataattaccacatcccaatcgttcccagataaacatattactttgttcatcgtagaccgcccattctttcaattcttcttttgtaacaggaagatatgtcataattacattttcgaactcttctgctggaattcccacaacctctttttctgcagtaaatttttctccatatttcatttgataaaaatattcataaagtccattataatccaacccctgcatatcctccgcattccagtttgaacataacagattgtttccctgatagccgaacgtactcacatatttttttgaatattcccgacactcctcactcaaaggctttacccggataatacaacttccatctacaatctctgtcacttccggtggttcaggtacgcataattcataacagaaattcccattttctgtatatgcccattcttttatttttgatagcgatatgtatgtaagtacaggctctgtatcctcactccagatcatttttgcggacatcacactcatttcttttccatcataactatattcttttctggtaattccaccatctgtatctgcttcatataaaattacacttcctttttcttcttgttctgcagattttaaaaattgttccatcttctgataattatccataacagaataatgatcggaaccaatgaccggattcccattttgtttgataatttctttcatccgattcatcatttgctcagcagtgttctgatctgcttcttgtattccattatattcagaataaatgtctcggacaatgcccataattttttcacaatcgttcacaacttcctttttcttgtcttcatcgattggtagattatatcccttatccggattttccatggtagtgtttttctgattcttctcattttttacatctgtgctgtttaacgatatcttactttcacaggaagtcagaatcattcctatacaaagtactaacaaaatactttttcttttcatattgccccctaattattactgtaattctcttcccactcttcttctgttaaccttggcatataccaccctgcatttgcattttgatctgaactaattaccttatttgataaatactggaaacttccgtcttccataggttttatcatcaattcactggtgattgcctgatctaacattctgatttcccatactgcttctatcgtaagttttaatgttccatcttgtaatttttcatatgagataacttccggatatggctcatatgggaattcacaatcatataaccctcgcggtctgtatctaaaagttttattattagagttataaaaagtttccttttcaatctcggtattactaaatggtaaataggtctttataacctcttcaaactcatcttctggaacttcatattctgctccaccataatttgcttcatatggaacttgctttccatatttcatataatacattttttcataaagatcataaaaatcaagttccgtataattctggttatcccaatttgtaatcaacagattattaagtgcataccccaacggcataacatattttcgattcaattcccggcatgttttatctaatggctgcactctgaatccagtttcacccggtgctccatcaaatcccggtgggtgatattcctccagaaacaagtatcctttttctgtatatttccactcatatgcttcatattcatcataataattagcctgtggactattatccttccatttaacctgacataatcgaacatttatctttccattcattgactctaaatgatattgtataatttccccttcatcaaatacaacaacaatatcaactgctgcctgttcttctttctccgctgctttgcaaaattcttctactttttcacgattgaccatatcaatctgattatcacaatctactgccgcatatccttttttttccagacaattgataatttttcttttcacctttaatgtatttaactccgacttctccttcatataaacagaccgaaaagtttgcgctgttttttttacttctgcattcatttcagattctacggtttctttcttttcttctttttccgtaattcgattttgtccgcaccctgtaaaaacaataagaactatcaatatcatcgcaaatatcttacatatgtaataattccacataaaaatttttttattcttcaaaatactcatccaatattgttgcatcttttttaacaacataaccacttccaccgattcctttcttctaatttttttgttccttaaatcttacgcttgtaatatttaaaaatcaagtctattttcaggaattgtatactccagattcaccatctttatgtgcgatatatcctattttattaccatcctctatatcttctccatttttgttaccctgtcattttaaagaacatccttacttacactgttacatatttttccgcttcttctttgcacttcaacgtatttccatgcccaattacatattccatacattcttttccctgctcttcttttccgattcggtagtaacatactcccagcaggaatctgcgtgtaacctcataataaggcaacttttccgtatcattttccagtaatcttactgctgcctcatcttcacctttcagcatcaaattttttgccataaacagtggattcttttgaaatactttccctgctttttctaatgtagccgaataacctgccgcatctttctcctgatatttcttcgacagttcgagattcgtcatgacctgctgccaggaacgtccctctctttttccttcccattcattctttatatactcttctgccttctgcaactgcccatttatgatcagtgcaactacatatttagactcagctatcagcatgacacttttttgaaatccatgataatccaagctctttccgtactttatcaactcttccagcatttctgaatatttttctgcatcacattgctgtgacagaatccggtcaatttttgaaaaatctctgagaatgtccctgattaaaatgaatatacctgcaatcagatcaaccaccacgcaaatccacagaagccagggatctgtcgtgacccagcccggctgcttcacatcgaaaaagagtactgtctcctgatgcgggaacggatttcctttgaaaatactcaccacacagatcaatgctgcataaatcaacagcacattccgtatcatcctgatgcgtccatttttctgcttttcataaatcttttttatctgctcttccattttctctacctcgctgtcacactatttttgtacctacaacataattatacataatttctgctgttattgaaatcttctcttgctgtctcctgctttccgggagtataagctgccagcagagttttatggcactcggacaggcaaagatcagtctgcttcttgcatgcctgcgaaaactgatcctgctgatccctctgatctttatcctgccgctctttttatctgataaggtatttgcagttttccttgcagaaccagtcagtgatatcctggcggctgccattacaaccataaccttcttaagccgctttaatggaatattgaaccagaaagacctcgcctgctgcaaaattttcaccaatacagactgatgcaattaatgccagtgataccagtacatctgattgcctgaacctgtccgattattttcttcagtcttcggtgcagattatctgcatccatacattgtctcatcttcccatctccttatcaccagaaatattaatattgtagcgaatctctgttcggttgtacaatatctactgttgcctgttcttctttctccgctgctttgcaaaattcttctactttttcacgattgaccatatcgatctgattatcacaatctaccgccgcatatcctttttcttccagacaattgataatttttcttttcacctttaatgtatttaactccgacttctccttcatataaacagaccgaaaagtttgcactgtttttttttacttctgcattcatttcagattctacggtttctttcttttcttctttttccgtaattcgattttgtccgcaccctgtaaaaacaataagaactatcaatatcatcgcaaatatcttacatatgtaataatttctcataaaaatttttttattcttcaaaatactcatccaatactgttgcatcttttttaacaacataaccacttccaccgattcctttcacattctcaaccatactgataagaagaattggtttgtccacgcttttatctgccgtaaacaccgaaaaccacccgatttctttgccagaagtatcttctttcgttgccttcaactcggctgtccctgtttttccagccagcaaaatatcgtcacgatgtgcagcatatccagttccttccggatcatttacaacaccttccaccccttgcataatttcttctacattttctttgctaaacgcattttctatccatgtttcaccggatgcttcttctttgtatttcaaatacggttttatcatattcccttcatttaaaaatgaagtataaatacttgccagatgtaatggatttacaagaatctgaccttgcccataaccactatctgccaattgtatttctgtttctattttatctgtattggaatatgttgattcctgcatcgcaatctcaaacggcatattctgattaaatcctatttcatttaaagtattcataaaattctcactaccaattttaagagctgcctttgcaaaataaatattatcagaatagataattgcatttttcataataaccggttcatattcatgaagtgttgtcacttgataagatccccaagacgaatctttctgccatgccaaaccttcttttccaaaatcttcttttggatctatgctttccgtttttaacccaattcctgccacaactggtttaaatgttgagccaggacaccatacttgacgaaaacgattatataatggcttcttttcatcttcgtttaatgatgtccatttctctgatgataagccccgtataaattcattattatcataagatggggtacttaccaaagccaatacttctcccgtataaggattcattgcgacagaacaccccggatcttctttaaactgctcgtataatgatttttgcaaatcggaatctatcgttaattttatatccataccatcttctttaaaaatacttgcaagaacctcttttacttccccatcactatccaaaatctttatatcacaaccatcttttccttttaattgcttttcgtataacttttccaccccagatcttccgatcacactttcaactgaatatccttcccctggatgattttccaaatcttctgctgttatagactgtacataaccaattaaatgagctgctgcttcccctaactcataggttctaacttccacatctgatagcataacccctggaatttccaaaagtttattctgacaatcctgctcctcaagtgtcttttcttctggctgtattttcattaaatctatttcttctactttcggaatagtttcaattggtacaaaagaatcttcttttacccactttgctgtgagtttgttatttattgtttctacatctatctctaataactccgctattttttcaatagatacattcctgtcttccagctttcccggtataatgccaactgatgttgctactccttttcctgcaagcattttaccatctcggtctaatatttctcctctctccgcttttgatgtagtaacacttattttatcatcactctctaaatctggaaaaatcaggctatcctgccatactaatttatatccctgtttcgtcttcttcagttccgccatattgtcaaattgtattgttccggcaattgtattacatgatgtttcatacgaaagcgtaactgtatctgcttttttctctttcacagctatatgactgattttaatgtcactgacctctattccttcgtatatcttagaatttcgttgtatgtattcttcttttgtcagataaactttttcatctgaatctatcatagtatacattacttcatattcctttttttcaatatggttcatatattccataagtgtgtcttctggtgattctgttatcgtcctttttaataaaacacctcctgaaacagcaattactgttatagctactatcaacccaaaaatcttacaaatgtgagatttttggatattttgcttttttcgtcttcttttcatagatacccctttcttctaattattttatttttcaaaatcttacacctgtaatatttaaaagtcaagtaaaatattatgttttcttttaaaattttgtttaatacattcatccaaaagactctccaataaaaaactgacgaaatttctttagggcaataataattagcttttgttcttccgttacctatccattttgaaatttgttttcccaccaattctaatgctaagataacaaatcaatgactgactcaaacagatgcaccgtatcattggatttctctgtgaaaatggaaaaagaatagttcttatcacttccatttgcttctccgataaaactggttccgattcccctaatagctgcatatttcggatttcctttctcatccatccctacaaacaccgtattgtgatgaaattcactttcataaactcttccagactctaagcaaaactgaatgatttctttatcaatcccacgtcctgaaagatacgcaatcactttttgattatcttgatttttctttggcaacagtagctgtttctccatcagaacactcttagatacagaaagaggcggttgaatatttgcccgttctgcaagcaattcaaccgcctctaaaaaactgtatccttttactttaaccagataatccagtgctgatctgccaccggttctctgactccaccacatccatttcccatttgatattttcaaaccatcgtgtgttctggtagtgtaggtattaccagaaaagtgaaccaattcgtatggttcataatttttcaagtatgtgaataagtccatccgcttgacctcctgcacgactgatggtggtatatatggcataattttcatctcctttcctaccttggattgatattattcgggataatcccgggcatgaaaatagccaggtgattccttgggggtagaaccaactggctatgtattcatagattatttatcctctttcccaccatctcttttcttttttcaccttatacttttctccatatttttcataatacattcttcgcaattgcttgtctttcataacatcttttgctaatttccatgtcaacatagattgtattcctttattatttttatctatttctggaaaacacttcttgattgtctcgacatcgcaactccaaatcgctgtattaatttttttgtacagctgatcctcttccccatcttcttcatatacatcaatcaattctggatgttcatcataatattgcgctctactttccatttccttcatacaacgttctacatactcttcagaatttacatatacttcatgataccagatgtcatctaaataattctttatcctttcattatctatttttgcgcttttaacaatctgatcaaatatcctcatcattcgatttataaatatcgtcattccatgcattagttgaatttttgtgcgatattcatcttgtctttccatttgtcctctactaaccaactcaaaaagtctggcgcattcatttactatatcaaaatgtttcattgcctcatattcttcttgcgatataatattatccaaaaccaaactttcaaatggaatacctttatattggcttagtatttcattataataaatcatcggaatatccatcaaattcttgaaattgttatccttcttctcatcttctattttctcaaaatcaatatttcgtaacgaatcaaaaaattcagatatttcttttgtttccttaatcggcaaaaaataatatcccacatattcttctctaactcgatattcattaatattcaatattaaacgcttatataatctgtctatagacatatacaatggatttaataacatttgtttatatcgtacttttcgcttcttatccattcttgcatttatattttctatatatactgtaactaatgccgaagtaataattcctgtagacaaccctacaactatattttttacatcattgtaactttcgggcatccaacaagatccaattaatgctcctatagctactactacaagaatgcttattgcaacatacaacatattaactttttcctgaagtatattcagttttttactcaaaaattttattacctttcttatttttttcatatgtctattttccatcatctttccgaatttcatcaattatccgacctatattacaagtaatctgtcctttacactgatgaatatcttcattgattttcttttcctgctcaatagcaatctctactttctctgccaactctccaattgcagaattcttcttcggattgattcctgttctggcaagtaacaacttatagataaatgtctgatgtccatctttttcattctggataatctgttcagcattcggctcaatatcatcttcatatgaattttcataatgtaacagcaagaacaattcaaatgccggattgctaaccgctaatatattgttcttttcaccttctgctactaattcatcataatcaagcaccttctcttcaaaaatatctccatcaaaaacaatgatcatcttatctcgttctttatcaaatgatatttccggattttctttctggtcttccgcaaattcaatcaaacgtcttggaaatgaaatatctctgtctccctctgttttttcaagcaaacggatatcaatcaacggatgaatatttaattcttttcgtatatcaattaactttttgaaataccatgtttctgtattagcaccttcacatatgaaaaagtacttacgataaggctcaatctgttcttcttcatctgtagttctgctattccaattcgtataacttcttactggagccaaggctactcctcctctctcggtgcagaaatactttctgcactgtcacagcagtcgtcaggtgtctgtgcaagcacatccttctgactcgttgctcgcgcaaaatcgaatgttgaaaataccggtatcgcaccatatcttccttccagatatgccttgctcaaaactttatcgtatctctccttgaaacgatctaaggaataaatagagcttgcattttctgcgttacgttctataaaccagatttcatcccttctaaaaatagcctgatccataatggatgattcatgtgtagtgaacaatagttgcatacgctgctcatcatgtagctgcataaacaattgcaaaaatcgttctgtcagcttcggatgtaagcttctctccaattcatccacaacataaagaacatcttctcgtttattcaacagcatatccatcaaatcgaataatcttcttgttccatcagactcttcatcaaaaccgaactcataaaatgacttattatgatgtaaccggattgttgtgaccttcggttcagaatgtccttcaacttcgatattaaagaaagtttccttcgacctcatcgtcattctgaatgatggttcttcctgctcttccattctattttttacatgctgcatcatcttatcaaatactgatttcggcaatgcatttgataactcatccaatgtaatttcttcaattttcacctggctgatacccgtatcaaatgttttgatcaatttgttaatcagcttcagcgaattatcatcataataatattccaaatcaatcaatggtgtatccggtgtgatgatcgaaatatgattctgaatccaatcatatacatcccggaaaaacaataatttagatcgtgtgctatatttttttccacgattcatttctgtcaggaacaaagatgtttcatttccttcaaaatcatctgcataggtttcaaatttatttttttctgtgtttgtcagcgtaataccatcatttaacaccggacgtttacttccttctcgttcaaagagacattttgctgaaccattctgatataattcatataaccattctccggttacttttcgtctgcttaaaactgcggaaaaaccataggcataaaatttgtcacctacagtaatctgaatttcaaaactactttctcgttccttattctcctgccgattcttacaaaacatctgtgtagcttctatcggaataccattgcagacactgtctttaaaaaatttaaagaacaatgccagattggtctttccagatgcatttgctccataaactactgcatattttaataactgggtactttttatctttaacctgtgatttgcatttgttcgtattttatttgaggaaatcattgtcagctctgctgctttatcaaaagatttaaaattttcaacacttacttttactaacattcttatacacctccacttttattatatgttttactcttctctcagtcaatgtaaattttcttatttagagattttttcgttatatattgtttctttttctatttttaacaattttattttgagttatgcatataatatcaatgtataagtcagttttttgtagcgacactattttactaatgccgctacatgaaatattacaataaataaaaacttctaattcttttttcttctatctctcccaatccatccttcctgtcacattcaacatcttttcttctcggaagctgagcatctttccattagttccaccgacaatgatatgatccaacaattctatccccagtagctgtccgcacttctgcagctttctcgtaacaatcatatcctcttttgacggtttcacattgccactgggatgattatgaagtccaatgattgcagaagcatttgccagaatactgctcttaaaaacttctctgggaattaccaaagatgcattgattgttccaacactgaccagattcatattgattatctatccattatttttcatattcaggatacaatcaatcaggatataatcataatcctttttcaaatctgccagatacagctttaaagtctgctctctactcatggcatttaccagtgagatttccatgcccgataattcaatgttagttggaataatgtctactccttctttgtgatataaaattccctcattatacacaaatggttcgtcttgtaatactttcttcatctgtgtatccaacgtaataggaagattatctgcatcagtccaccctaatgcgattgttaagtctccctgtggatcagcatcaaccaataatactttccgcccctgatgtgcaagaccaattccaagatttaatgtcgttgtggtcttagcggttcctcccttctgatttgcaagagcgataactttacacttggtcatattgttacctccttcctcgaaaaatttaatagccaatccgttttacgagactggctatgtataaaaataagcatgaaaaaaccgattggctcttggtgaaccaatcggctatgtactattagcagacaattttttgatttttaggaataacggcctctgataatgttgcactattatttttaacatctgttacagcctcatctgcagattcatgagtttctaaccatagtttttcctctaattttaaatgttccatcaaaaagtcatgtcgcttagaataatcatcaaaaatttcgctccatttcagtacatatattttagtcaaaccgtcatcctgacaatgaactaaatgttgctctcctaaatgcttatgactttctaattctcccaaaatataatgacttttatcaaattcatttccaaccaaataaaacatccatttaacattacctgcattaaatcttggagtgtcttttattactcgcatatatttttttacttgtgataattctttttctcctaattttattttaggtctttttaattcaacaacaacattttctgttactttaccctgacgatcttgacgtaacatatatatatccatttctttatttttatcaggatgctctatatgtatctcttcttccattccagtttccgcttttatcattccctttaatgctaattcaaaatcaggttcagctgatgtaattaaattgtattgttctccaaaaatccaataatgattttctactaattcttgtacatgtgttacttcatatgaattaaactctttattaaacacaatttcttttaatgcctgaataactttctgcctatcacataataattttattgtttttgttatattacttaatgaactgtattcaagtatactagataattccttccgttcctcttcatccagttcaattacaccttgtaatattttaaacaactctggtttgtttccattatccataataagccttaataattgtaatgtgatttttttattatcattacttaagcctgtgaaaattttaggctgtgcagcatataaagcacctacaagactatctagttctttcttttgatacgcctgtataaaattcgtcgtatcaaattccggatacaatttatcatctatcagttttgaaatataagcatctgaagcttctttcaaatacctacttctatatttaataagaaatgtattaattccatttattaaaattttgtattcatcatcacacttattaggaaataagtccccttgaccttctatctcctcatttgtaaaatgaaaatcatcaaaataactactttttatatacacgctatgaaaaaaatggtctgcccttttgttcaattttgtagtttctttatatctttctttattatctgaaccaagataatatattcgcgaatattcattccccaatttttgcttccattgaacaaaacgaacgtcatacgtctccttacacccatatttagaaacatccatattttcagtatgctcaacaaaatctgaataatttatgcattctttatcaacgataattttatagtcattttctttattcaattccaaaaaccaaaaaaattcttctttgattttattgataatatcttctttttccatggattctaattgtgtaaaacttacctttgttcccgtcaatttttctactttacacggaagtttttcaccattatcatcatattgatttagagaatctttattcatagagatgtaatactcatatgtatccccatcttttcgatatacagtatcccaccttgccgtctgagaaaatgcaaaaaatgtcagacgaccaatcccttttctcccatgaggtaacgtatgatttgttttctgagacgcatttgcttttttagaatcattaaatggttgaaatttatatttcaattcatcataattaattccacatccattatcacgtattgtaatcatattgatgagtcccattttatttcgatttaactcaacttctacttgtgttgcaaatgcatcaaatccattccaaatatattcacaaatagcatctaacggctttatatttttcaaatttttttgtatgccttctggtgtaataagaacacttttcatcttttcactcttttctattgtaatttataaaactatataatacttttcaatatctataaatagaatgtactacctttggatttttcaatcatacattaactcctttttctctcacataatcggtaatatcttctaccaaatattcttttccctgtgtatgaagaacatcgtaacatttaataatatagttatccaaaattccggttgaatttaatattttatacactttagctggagacatcttccacttatccgcaaggctatacagcatgaatattgaaaaactcaattcctttttctcacacataatcactaccaacctttctgtcatatttatatttagattataacaagtattttatgttcatacactatatttttcaattattatcaaaaagcaggcaatgaaaatcacaccccctcttcatccaactgattttttcatatactatccgcttcgcttcatctcgctatacgtacgtcgcacgatgcatataaaaagaaatcctcgatcacaagtaaacttgtgtcgaggatttctttttatatacgccgtgcttgtgctagacgcttacattccagcctgagctgcaacttctgctgcgaagtcgtcaactttcttttcgattccttcgccagtctcgaaacgaacgaattttgtaactttaacgtttgcaccgttctcttttgctaccttatcaacgtattttcctactgtaaggtcgctgtcctgaacgtatacctgatcaagcagacagatctctttgagctctttgttcagacgtccgatgatcatcttctcgatgatgttttccggtttctccgggttctctttcttagcctgagcaagaaggatttctttctcgtgatcaaggtaatcctgagatacttcctcacgggatacatacttcggagacatagctgctacctgcatagctacgttcttcagtgctactttgatctcgtcgttaacaacatctgtatcagcaacaacaagaacaccgatacgtccgccaccgtggatgtaaggaacaaccacaccgttgtctgctgcaactttctcgaatcttctgatgttcaggttctctccgataactgcgatcttctctacgagagcatcttttacagtctttgttgtatcagcttcccaagcctctgccataaatgcatcaagatcagctgcttctgaatctactacctggttagcaactgcttctacgaatccctggaactcgtcgttctttgcaacgaagtctgtctcagagtttacttctacgattgcagcaactttgtcatctttaacaactgtcttaacgataccttctgcagcgattcttccagcttttttctcagctttagcctgtccgttctttctaaggaactctacagctgcgtccatatctccgtttgtctcagaaagcgcttttttacagtccatcattccagcgcctgtcatttctcttaactcttttaccattcctgctgtgattgccatgataattttcctccattattcataatgtgtatgtcactgtaagcagtaacatatgcttttctctatagaactatttctataaagtaaaatgcttcaacctgataatcaggctgaagcattttctttcatatcaagaactgatattactcttctacagcctcttcagcttcagctgcttctgcagcctcctcgtaatactcatcctcagctgcaccctggtttgcttcgataacagcgtctgccatcttagaaacgatcagttttacagctctgattgcatcatcattacctgggattacgtaatccagctcttctggatcacagtttgtatcacagataccgatcagcggaattccgagtgtgtgtgcttcctgtacacagattctttctttcttaggatctacgatgaagatagcgtctggcagtttcttcatgtctttgattccgccaaggttcttctcaagctttgtccactcttttttgatttcgataacttctttcttcggaagtacttcgaatgttccatcttctgccattctctcgatgtctttcagacgtttgatacggctctggattgtcttgaagtttgtaagcattcctccaagccatctctcgtttacataatacattccgcaacgctcagcctcagctttgattgcatcctgtgcctgtttctttgttcctacgaaaagaactgtaccgccttctgcagcgatgtcagaaacagccttatatgcatcgtcaaccattcctacagatttctgcaggtcgatgatgtagataccatttctctctgtgtagatgtatggagccatcttagggttccatcttcttgtctgatgtccaaaatgaacacctgcttccaataactgcttcattgaaataacgctcatgttattctcctccatttggtttttttcttccgtatgttttactctccttcgcaaccggacgaaactcctgtctcgacttaggcaccttggaaggaatccacatacgtgttttttagcaacgttcgtagtatagcataaaacaagggacgttgcaagaactttttcccacaacacccccatttttcaacattttttgttattgttcgtactatgtgcgaccaacagccatttttatcctcctacgcaacaagatgtgaatttcctattcctataccagctgaaacgctttcagcacatacagccatcctgtcaacgtgaatgcactgaacaatgttgtcagcatcactacacttgatgataaaactccttcatgtcccatattctttgccataacaaaactgcttactgttgttgcagatccaagcattacaaggattgcaatcagttcttcctgacggaatcccagtttcacagcaatcggaagaaaaattgccacaaatacaaccaacttcataattgttgctgtcacagccggtttgatctttccaagtgctttcctaaaatcaaaggtagctcccattgccatcagccccattggtgtggacattcctccaatacttgtcaccgttttattaagaattaccggcattgggatcttgcaggctgaccagatcagaccagccacgattccaatgatgattggattggttacgattccctttaacgttttcatccatacagctttatcaattgcctttcgttccggatgaaaaaaggacaacacgataactgccattacattataaagtggtacacttccaatgatcataagtggcgccatccctgcatttccataaatattctggataaatgcaattccaagaagtgctgcgctgctccggtaagaagcctgtataaattccccctggattgaacggtctttccagatgcaagataccagtgcagcaattgtaatacagataaatgttactacaaagcagaaaatcacaaatttgatattccacacttctttaaaatcaacctttgccaggtcaccaaacaacaataccggcaatggaatcaaaaagacaaatttattcatctttgctgcaaactcttcatccatccagccaagctttctgaacagcattcccagtaccatcatcaaaaagatcggtacggttgcattcagactaaaaactaaattttccattcttctcaccagtcccctactctgtacgaagcgctgtcacaggatcactctttgctgctttctttgatgggatcagtccaccaagtaatgtaaggacaacacttaataaaatcagtatgattgccggaacaatcggcagaactgcatttaccttcgcattatccgccacactgtgaataatcgcatttcccggaatcagaagtaataaagtcagtccgattccgatcaatcctgcacaaagtccgataataaatgtctctgcattaaatacctgtgatacatttcgctttgacgcaccgattgctcttaatattccaatttccttcttccgctcaagcacactgatataggtaataacaccaatcataatggaagataccacaagagaaattgctacaaatgcaatcagcacataacttatcgtatctacgattgttgtgacagaggacattaaagttccaactacatcggtataagtaatgacctgctcatccttcccttctgcctccatcctgctattataatcgtccagaatctttactacttgttcctttccttcaaaatcctttggataaatgttaatagcagacgggactgcaaaatctacatatcccagtttctgcagattactatcataagaagccaagcctttcccactcatcgacatcataagctctgccaaatcatcttccgtcatattcatctgaaatgcatctgcaaatgctgtcggatcaatctgcattgcatttccgaggctgttctgaagctgcgttcctacgttggtcatcatctgcttcattgcagattcaagccctgttgtcatctgaccgataatctgtgtcattgcagtggacacctgtgtctcaagtgtctgaccaatcgtatttcccattgcccccattgcctgattcatatagtttccgatgatttttgacacctggctctccaactgatccatatcgatcattgctgacagaccttcctgaaactgcttctttccatcatctgtttgcagataagccatgaaatattctcccatcttagacggatccggaagaccattctctgaagcatatgccaaataacctttcacaagatcatctgatagtttctcaagctgttccggtgttatctcaatctccggatcttccggcataacttctgacatccaatctgaaattattttcttcgcttcatccgtctgaagatattccatcaaatattcatcaaattgatccggatctgtatatcctttttccgtaatatactgttcgtatccggccataatatttttgatcaattcctgtattttctcagttgtaatcgtcacagttccgcttgattttataatatcttttatattatcagaaataatcttttttgctgcatctgtcttaagaaatgctgtaaaatcctctccaagacctgaataatctgcctctggatgtgtctttgcatactcctgatatcccgtcagcagtccacaagccatctgtttcataccatccggtgataccttcagatccagattcgaaacgatctctcccagattcatctgcggcattccggaaagatctaagttcagagaatctggattcacaagtcccgacagatccagcgtattacttcctgtctgaaatgctcttgacagatccatagactcactgagatttaacgaattcccgaaatccagagaatttcctaaattgttcatcgcacttgcgtcaaatccaaatgctttctgcagtgctgcttcgtcaaccgtaaataaagaatccatggcgaatccattttcactgtctttctctccgaattttttatttgtaaatacattaacatccggatttgtcagctgttgtttcacaatctcactttttgctgcctgttctgccacatgtttcgtcaatgatgtcggatatgcaattcccggactcagagaggaggctttcgcatcttcagcgggtttgacaataccaaccacggtaagatcttccccattcgctacaagtgatttcatataatcttcattatccgtcttatctttccagacctgatactgactgtcatactcataataatcagaactgttcacaagcttgaactttgttccgataatatcatcataagaataggttcccagatcatccggtgtagtaacattttcctctttcataaatgactggatcatctcatcaagctccagcggatcacgaagtcccaatgtataaagcataaaatcactcattccgccattcgaagtcagaaccacaacacattcattatatctctctggccaatgacccttttccacttcatactgattttcatagagtttactactctccggcatctcataaaaaacatctgtactcatcatagatgacatcatactattcgtacttatagaagaacccaatcccatagcagaaaaggattgatctggattcacctgacggatactgtctttattttctttataaatctgcggagaaacgctgtacttatattctatagcattcgtatatcgtttcactccactcttgccagtatcaagatacttcttcaaagcaccaaggtcgtttgaatccattgtggaaaacatattcgtcaccatctgaattactttaacctgatcctttgactttttctttgtatctgacttctctttgtctgtttttttatcgtccgcagaagcactgtccatcccgatcatcatggatgtcaaatcaaagcctgtactttgtatctgcagcggatattctgaaagcgtctcttcctctacattctgaatatattgattcacacctgtagatagagacagaattaatgcaattccgataattccgattgaacctgcaaatgaagtcagaagcgttcgtgccttctttgtcttcagattgttaaagctcaaagctaatgctgtcagaaatgacatcgaggatttccccatattcctgtgttctgccactcctatcgttgcttcatctacttcaaacggatctgtatctgaacggatcacaccatcttttaatgtaacgattcttgtcgcatactgctccgcaagctccggattatgtgtaaccataacaaccagacggtctttcgctacttcctgaagaagatccatgacctgcacacttgtatcactgtccagtgcacctgtcggttcatctgcaagcaggatatccggatcattcactaatgcccgggcaatcgcaacacgttgcatctgtcccccggacatctgactcgggcgcttgtgaagctgcgcacccagaccaaccttttcaagtgcttctgtcgcacgtttccttctctcggacttgccaatccccgaaatcgtaagtgccagttcaacatttgccagaacagtctgatgcggaatcagattataactctggaaaacaaatccaatcgtatgattacgataagaatcccaatctctgtccttatatttcttcgttgatattccattgatgatcaggtctccgctgtcataccgatccagaccgccaatgatattcagaagcgttgtctttcccgaaccactcggtcccagaatagcaacaaattcattatctctgagattcagactgacatcatccaatgctttctgtatcagattacctgttcgatattccttgcaaatatgttgtatctgaagcatgccttctctccttttccaatcactattcagccattattttactattctacaccctgcttggatgaattgtcattcactttataaggatttttcttgatttctatacattttttccattaatgtggttagatagtatgtaatacacgaaagcattgaaggaatttatcatgaaaacatataaaagacctgttgtttccgttgatacaggccttgctgaaggagtatacgctgcaagtggtgcaactataaaaactgccagcagataaatttctactggcaggaaaaatttatattttttcaattgtctacttaacggggagcagttcccattccaatctccatagctccccaaaatggttttagatcatcattcaatacaccacgtgtaagtagttgattgataaatgctcctgtcttcttaacataatcctttaattgcttctattgttcgggtatattctcgttctacttcttcaaacatctctgtagtgttttctttgatttctttgtctcgaagctcttctgttaatgctgagctgacctcgaataactttgtaaatccaagattcatgcacacgcctttcaatgtatgtgcacttcggaatgcgagttctgcatcctgattttcaagtccttcttttaatccccggaaacttgtatcatccaaaaacttcaatacaaatttacggaccagtgtttcacttccaagtcttctcatcacatcatcatagtcactatctattgcttcatagcattcttctaaattcatttttgtttactccttaattttcttttatttcaatagtcccattaattcttcaaaacagacaccatccgtcaacggaatctccatttcaattgacttttgtatgcacttctttataaatgcggatgcctttcggacagattttgtaaattccactccattgaccgcatctgctgcaatgattgcagagaaaatatctcccgtaccacatctggaatgtcctactttatgtgtacggatcatctcgtatcctttgcctttttcatagcacaagttggatacatacgttttctgtggaattcctgtaatcacaactttttctggtccggtctgcacaatctgttctgccatctttgccagctctcttgttgtccaccgttccttatacggtgttcctgtcaggatacatgcctctgtcacatttggaacaactacatccgcatagcggactaattgaatcatctgtctgcacatttcttccgtataagtcgaatatgcctccccattgtcccccatcaccggatcgatcacagccactgtattctcgtctctaaaatactggataaactcactgacaatccgaatctgttctgctgatcccaaaaaaccagtacaaattccttcgaacttcagatccagcttcttccattgttcaatatatgcttccatatttgatgtataatctgtaaaataataatcttcatatgcggtatgatttgaaaaaatcgaggtaggcactgcacaacactgcactttcagcattgaaataatcggcatctgtaccgcaattgagcatctgccaaagcctgtaaagtcattgatcagcgcaatttttttctgttgattatgattctgcatcattctattccctcgtttcttctatataaatagacatactaatttaatttaattacaatatgtcatagatgtcaatatttctttttactattctctttcaccttctgtgtaactgccttttctactataataatttcttattaaataatatctgatttgtttatgatacctcaaaaacattctgttttttttactttttacccaacgtattccacaatcactctctttatttttccattgtttttatacaaaaaacacaattttccacatttttccttcttcattgatttttcacacctctcttcccacgttttcagcccgcttgacagtttcccctaaaaagtgtacggttacgttgtaaattctaagaaaattctatgaggtgaaaaaatgcaggaattaaaaccaatcaaagaaggtaaagttcgtgaaatttatgataatggagacagcttaatcatggttgctacagaccgcatcagctgctttgacgtgattctcaacaatgaagtcacaaagaaaggaactgtcctgactcagatgtccaaattctggtttgatctgacagaagacattcttcctaaccacatgctctctgttgatgtaaaagatatgccggagttcttccagcaggagaaatatgatggaaaatctatgatgtgtaagaaactcgaaatgcttccaatcgagtgtatcgttcgtggttatatcactggaagtggctgggaaagctataaagaaaacggaactgtttgtggaatcacacttccggaaggattaaaggaatctgacaaacttcctgaaccaatctatacaccttccacaaaggctgaaatcggagatcacgatgagaacatttcattcgagcagagcgttgatcaccttgaaaaatattaccctggaagaggacgtgaactcgctgagaaacttcgcgacaacacaattgctctctataagaaatgtgctgaatatgctctgagcaaaggtatcattattgcagatacaaaatttgagttcggacttgatgaaaatggaaatatggtaattggagatgagatgctcactcctgacagttcccgtttctggcctgctgatggttatgaagccggacatggacagccatcttttgacaagcagtttgcccgtgactggctgaaagcaaatccagacaacgactggacacttccacaggaaattgtagataagacgattgagaaataccttcaggcatataagatgctgacaggaaaagatctggataaataagatttcataaaacaaacagggacgaaatgaaccgcttaacaagcttttcatttcgtccttttttactacatttctgtaaaaagaaaacgaggatcaactcctcgctttctctctggtttttagtttgttgttttcaccctacctgtgtgatcttttgtgattgctttgattgcaagcagaactccaatctgcagagcaattccgatcacgagacagatgactgcattctgcaagatacctgcgatcacatatgtaatacaggaaactgctgctacagtcattgcatatggaagctgcgtggatacatgatttacatgattacactgcgctcctgcggatgccatgattgttgtatctgaaataggtgaacaatgatctccgcaaactgctccggccatacaagctgagattgagatgatcatcattgtctcgttcgtaccctggaatactgcaactacgattggaatcagaattccgaatgttccccaggaagtacctgttgcaaatgcaaggaaacatcctacaaggaagatgattgctgggagaaggttcatcaatccgcctgctgctgaattcattacagaagctacgaatggagctgctccgagactgtctgtcattgctttcagagtccatgcgaatgtaagaatcaggatagccggaaccattgccttaaatccttccggaatgcaagccatagaatccgaaaaacgaagaacttttcttactacataaaaaacaattgtaattaccattgcaaagaaacttccaagcatcagtccaaccgatgcatcactttcggagaaagcctctacaaagcctgttcctgagaagaacccaccagaataaatcataccaatgacacagcagacaataagtgacagaatcgggaatacaagatcgattacttttcctttattgtaaatcgcattttcggatgtattttcaaatggtctgtctcctgttgtaaaaagatccccttcaatcgcatttttctcatgcgccttcatcggaccataatcttcttttgcaagaaccagtgttaccatcattataactgtaagaattgcataatagttatatgggattgcacgaataaaaattgaaaatccatcctcccctttaacaaatcctgttactgctgctgcccaggaagaaatcggtgcaataatgcagattggtgctgccgtagcatcgatcagatatgcaagtttcgcacgggatacattgtggctgtctgttacaggacgcataacgctcccaactgtaaggcagttaaaataatcatcaataaaaatcagcactccaagtgtgattgttgcaagctgtgcacccgctcttgtcttgatatgctctttcgcccagcgtccgaatgctgcggaaccaccggctttattcatcatgcataccatgacaccaaggattaccaggaataccagaatacccatattgtaagaatctgtaagaactcctactataccatcttgaaatacatgtaagatggtagcttccggtttaaatcctgaccaaaatacacctccgatcaaaattccaacaaataaggagctataaacttcctttgtaataagtgccagtacgattgcaacgaccggcggcaccagagaccagattgttgcatagagctgaggtacatactcggcagatgtatctgcggcaaatactgttgttgaactacaacacagaatgagcagagacatcagaaacacataccccatttttcttttgtttctcattttcttttttcctttcctataaacttatgtttgttaagtttgtgtgtaagcatagtgggtttcgcctgggattctctaaacgcaaaaaatgccataggcactctctgctggtgagtcacccatggcataataattctagcgtcatcgatagctctccacacctgtgacagtccggcgtatcttctacatccggcccaggaatcatatctgggaatatcattccttcggcggcttctcctttctctcactgacagtcttcccaagactctcgtcagcggatactcatatcaccgcgcctctatcaaacattactatattatcacattctatttaaaaaagccagacttattttataatagttttcatttaatcattccaagtaaaattccgaatgccatactgagaacaactgatatcaggctgattgctgaaaacacactggtttcttttaataagaagatgatattggcaacaatcgccggtacactgatagaaaatgcctgtggaagaatcacagaccgaaacatctgcaaacagttcattcccaatgccagtgccgattccatttgcagcaccggcactgcctcaagctcgcttcgaaaactctctgccatgtagcttccacccaaaagccctaatcccacagctccgcatacttccgcggatatagacaatccaacctttgggagtccaaaatagataaaaaatagctgcttcccccactcagagaaacagctactataatcactgaaagatgattcatctaaaatctgattttttagttgttagaatagaatgaacccatataacggatatattcatcatctgttttatttgcctgccaattatgaacatttgctttattgtgctcacctgcaataacagaaagagatttgccaagattgtcaaatgcttcctctacacaagcttccggtgtcatagcagtcttcataacagcttctcctgctggaccgcctggaagattgcttaacaaacttggtgtaattgttgttcctaacgtgataacctcaacgtctacatttgtactctcacattctgctgccacagcttctgtcagtttcttaatgtaagattttcctgcaccatactgtgcgttatatggtgaactactgattgctgtcaaagaagatacattaattacagctccacgatcctgctttgcaaagattcccatgtaatgatagaagcatttcaagaatgtcataacattaacattgatcatctgctcatgcttctcccatggagtatcctgcaattttccaaatgtatggaaacatgcaacataactcatgaatcccatatcaaggtcttttgttgcttcaaaaatcttgtcagtacagtcggactgtgcaaaatctgcacggataaccatgtgatccacaccatatgtttcgctgatactctttccaagctcctgaagtttctcttctcttcttcctaccaggacaacactcattccctcagatgcgattttctctgcaaatgcttttccaacgccttctgttgctccaaggatgataccccactcaccgtatttttctcttaagttcattgttttttcctcctaatttttccgattcacgactaaaatatactatagcacaccttaaggaaaataacaatgtgattttgatatatttttaacaagctataccaatctgttcgcttaccttataacttcttttacagagtgatgtattctattcattattacttgaaaagatatccgccacctcactgattataataaatgttgtgaagttcaatcaactttcagcatccgataccccacgccaatgtgtgtttggatatattgtggagagtttggttctttctcgatttttttacgaagtgttgccataaacacacgaagggaagcaatatcattattccaactacttccccaaatgctttgcgtaaggaaagtatgggtcagaacttttcctgtatttcttgtcaacaggcaaagcagcttatattcaataggtgttaaatgcaactcttcttcattcaaataagcacaacctgcagcataatctacacgaagttttccgtttacaaaaacaaccgcttcggcaggggatactttttgcatcatcgataaccttctttgcgtgactcgtagtctggcaagcagttcctcaacagaaaatggctttgttaaataatcatctgcgccagcatccaacgcatcaattttatcggtatcttcactgcgagcactgattacgataattggcatatttgaccaagtacggatttttttaataatctcaacaccgtctatatcaggaagtcctaaatcaagtaaaacaatgtcaggattgtgtgaagatgtttctaaaattgccgattgaccatcgggtgccgtcagatatcggtattcgtgcgtttttaaggttgttgtaattaaatttctgacagatgtgtcatcttctacaactaatattagtgacttattcatatactttgacctcccctgccggtaatgtaaatgtaaatactgttccgtgcggcagattatctgagacagtaagttctccgccgtgggcgttaataatggacttgcacaaagataatccgagtcctaaacttcggcggctgtctgcaatttgattggcaccgctatagaacatgtcgaatatccgtggctttatttcgtcagcaattccgtttccgtcatccgatatagatacgattgcttgttttccccgcttttctgtccgaataacaatatgagagtttttaggtgtatatttgatagcattatcaacaatattgatgattacctgaacaataagctttgcatccatttttgcaagaagaaattcttctttgctttcaacggaaatatgatgttcttcactctttcggttaatatgatgtaacgcttctgtgatcacgtcatccatcaaatcttccgttatacggagattcaaccgtccttcttcaatccgggttacagccagcaagttttctacaagattaatcagccacatggaatcatcataaatatccatgtacagctgcttttttgtatcattatcaaagaaatcaccgttggacaaaagattgctggcattaccggaaatggatgtcagcggtgtcctcaaatcatgtgaaatagcacgcagcaggttcgctcgcaactgttcattttttgcaagaacggccgcctcctgtttctcacgggcatttttctcattttccaaagccagagcacattctccgagaatggatagtagaatactgttttcaaatggatcaagaggtatttcccccatcacgattccaataactccatataccatactgctgctgcgaacagcaaggtacagacattttgcattggaaagcgttcctgttgtagctccggcacgtttattgtttttcaatacccagccggcaacggccttttcattttcggaaatacacgattccaaattttcttcagttacagaaaaaatatgcggcgtatccaacacttctccatcagctaaataaaaaacgatatcttttctcaagagtttaatgagctgatttgaagttgcagatacaatttcatttttatcttttgcctgttgcaatagctggtttgtatcaaataacactttggtacggtaagcagattgtgccgcctgttttgcttggtttttaatccgtatagcaagagaaccggttaaaaatgccgccaacaacatgataataaaggtaacaggataaccctgatcatacgcctgcaaggtaaattgaggttccgtaaacaggaaattaaagaccaaaacacttacaatcgaggaaattaggctgtatatctgatgtttcgtgatgacagcggtgacaagaacacctaaaacaaaaacagtaatgatatttgctttgtcaaatccaaatttctggaaaatcattccgactaaactggataaaatcagaatcgcagcagattttaatgtatcagtgacagagaatacgatatgattctttttcctgccccctcttaactgatacactgccgcattagaaaccgtatccggaataatatgcacatccaggttaggggcataatcaatcaatttttctgtcagagtcggtttgctgagcaaatgccgttttgtagcagaactacgtccgatcacaatctttgacacaccggacaaacgagtaaattccgcaatctgaaacggaacatcttctccgtaaactgtttctatttttgccccaagttgctcagcaagacaaatatttgaacgcaggcgttttacattttcctcgctcatcaccaaaaaatctggggtttctacaaatagagccgtaaactcccctttaaaagcagaagccatttttgcagcggtacggataattttcgcattggatggagaagaagatagacatacaagaatatgttcgcctgtgtgataatctccatgattttttatgcgggtattttctgtgaggatattcacccgatccgcacatcgccgcagtgaaatctcccggaaagctgtcaaattttctattgtaaaaaaattttctactgcctgtttttcctgtgtctgtctgtatacatttcctgtattcaaacggttgatcaaatcctgtggttcaatatctattaattcaacctgatctgcattatcaaaaatagaatccgggatgcgttcccgtacaacaatttccgtaatggatgcaactgtatcacaaaggctttcaatatgctgaacattgacagtcgtatagacatcaatccctgcattcaaaagttccttaatgtcctgataccgttttgcatgacggcatccttcggcattcgtatgcgcaagttcatctacaaggataagctgtggttttcttttcaacgccatgccaatgccgaattcgtccagtatcataccattataaaaaacttctcttgtaggaagaacttctaagccattcaaaagagctgctgttttgggacatgcgtggggttctacataaccggctaccacgtcaattccctgctgtttttccatatgagctgcttctaacatggcgtaggttttacccacaccagctgcatatccgaaaaagattttcaaatgtcctttattacgtttttcttcatcagcttggatttcctttaataactgatccggattgtgtctgctttcactcatacggtcatctccttgtacaaaaacattatatagaataatacgtaaatttcagaaaagcattttagcactgacattaaaatcgcacaaagattataccaccttttcttctttttttccattcgggcgtgtagccgaaaacagaaaacgctccgaaaaatcacgcaatttttcgacaaatagacccttcatacaattaatgtcattttgccatatcactctcgctggtttctcaatcgtattgataggatgtaccgcattgtctatagagcctggagtaatgacactttgctttatttgaaaggataaggaacaatactcatctttcaaaatatcgttggaattttctatgataaagccaaaatcaagtttattattttccaacccatttattatttcacttacagaaccatagaacaggttcagctcatagtttgggtattcgcttgaaaattgttctaatagatctgcaatagaatctatgattgcaggtgtttcaaatccaatcctgagcttagaatctgaaataagtttttgagattgattttccttgagaaatttatccagcttttccataagaaaataaccataaataaatgctaccaataccactataagtaaaacaaagtctttcatatcaccaacttctttcaaaaattaaatatgaaaacatttttgaatatgtttcgtctccccaagaacaagcatggtactgccctttaacaactgcgtatcggaacttattttcaaattcataatatcatttgttttcagcgccataatattgatgtcatatttttttcgtatatccaactgaccgattgtttttcctatccattctcccggtatagatatttcaaagattgcatgttcttcatctagttctatgtaatcgaaaatatgatcagcactataacggatcgcaacccaatcggcaagctgcctttcgggataaacaatttcatctgcgccgtttcgtaaaagaaattttgcatgaacatcacgagcggcacgagacaccaccattcttgcaccgagttccttcaaaaggcacgttacttccaatgaactctgaaagttatctccgatagccacaatacaaacatcaaaatttccaacaccaagcgaacttaaaaaatcctcattagtcgcatccccaatctgagcgttagttacaaagggaagtacagcatcaactcgagtatcttctttatctaccgccatcacttgatgatgcaattcatctaattttatagcaatgtgccgtccgaatcttcccagaccgataagtaatattgatttcatttttttattctccttaacctactgtaattttttcctgaggatattttgaaccgttaggctttttttcagaaatggtagcaaaaatcaaggtcaatcctcccactctgccaaaaaacatcaggcaaatcaagattatatgggaaacaagccccaggtcaggagttattcccaacgataaccctaccgtcccgattgccgacgccgtctcaaacaaagcggtcataagtggaatatcttctgttctgcaaattaccattcctccgacaaggaataaaacgatatacatcaaaaaaatcgtagctgcatttctgatagtgccatccggaatttgtctgccgaaaaaatgggtgtgttccttttttctaaatacagataatgccgatgaaacgagaactgcaagagttgtcgttttcataccacctgcagtggaaccaggcgagccaccaatgagcatcagcataatgataagcatttgcccaacttcactgagtaaagtcaaatctgccgtattgaatcctgctgttctcggcgtaacggattgaaacaaagaaacccatactctttctgtaagaggcacatttgaaaattcaaaataaaaaaaataaagagccggtaagaatatcaatattcctgttaccataaaaatcaccttgctttgcatccggtattttttaaaatgccatttacgattctttatatcctcccaggtaaggaatccaatacctcctgcaataatcagcatcataattacaagatttacaatcggctgtacagaataagaggtcaacgaggaaaaaggggttcttataccgattagatcaaatcctgcattgcaaaaagcagaaatagaatggaacagtgaataccatattcctttccaaaacccaaagtccctgcaaaaaacaggggctaaaagaaccgcaccaatgatttcgataagaatagtagtccgaataataaattgtgttctccgcacaataccacccaccgttggagccgaaattgcctcttgcatggtacttcgctgcatcaacccgattttgcgtccggaaacaacagcaatcgcaatagcaatcgtaataattcccatacctccgatttgaatcagcagtaaaataactccttggccaaataaagaccagtagattgccgtatcattaacaaccagtcccgtcacacaaaccgcagaagttgcggtaaacaaagcatccaaaaaggaggtacactgaccgctttttgtagcaatcggcagcatcaaaagcagactgcctaagagaatcgcggataaaaaccctaaactaatcacttgaaatgatgttatatgtcgatgtcttgatctgtttgtctgttgcataactatatccccatagtcttaatttcttttttatattttctttattctatctttatttgtattaaatgggcgtaagtaagtttgttttgaaattaagattgtgtaaagatgagcagaagtctgaaatcttttgagaggggagatatgctgatcaagtccgctgccggaacaggtcacaagttcaaccggaatggctgtttcctccatatcgggatttgccttacgaagcatctgcacccggctcgtgattctctgatgaacatatttctttcttcattgccattttttattttctcctttgcctttgaataaaagaaaaggacactcatcttccagaagttctgaaaacaagcgtcctttcggtttttcttgccctgtttacctgttggtgtgaaactcatatacctcgtaaagtgcctgaatctgagaatttctatgaaattctcagatcgcgtacattcgtcaaattccgcataaacactggctttacagccagttgtttcttcggaactctcctcattgtcttcgcggaaattaaggacttctacgaattcacccgatgtagacaacacacgacttcgacatgcacggtctcgcagaactgatccaccgccgtcatcttctccacacgatatcccgccagctgcatcatctccagatcacgtgccagactggtcatcttacaggaaatatatacaatcttatccaccccataattcaagatcttcgggagtgccttcgggtgaattccgtctctcggcggatccagtacgatcacatccggcttctcttcaatctcatcaagtaccttaaacacatctccggcaataaatctgcagttggaaagtccgtttcggacagcattttcttttgctgcctcgactgcttcttcaataatctcgacaccgatcactttcttcgcaaccggagcaagcacctgaccgattgttcctgttccgctgaacagatcgaatacaacctgattatcaatatctccaatgtattctcttacagtctcgtacagcacttctgcaccttttgagtttggctggaagaaggaaaatggtgtaatcttgaattccagtccgagaagcttctcataaaagaagtcctgtccataaagaattcttgtctcatcactcttcacgacatcggacagggagtcattcaatatatgaaggattccaacaatctttccttctaattctaatgccagaagttcttctactaatggagttaagtcatattcttcctgcgttgtcgttacaagattcacaagaatctcgcctgttgtatcgcctcgtcttaaaagaagatggcggagataaccgacatgctgcattttcttataataacttacatttctttctttgaaataattaagcacacaaagaagaatcttatccatatcttcatggacaagctgacagtctcctgctgtcagtacatcataagtacttccttttttatgaagaccgagagataacggaccgtctttgaattcatctccaaaagaaaattccattttattacgataatggaattccttcggactgtgcttcacaccttcaaaaacatattcaccttttactaccggatccatgattctgcggatctgtccttctttcatcttcacctgctcttcatatggcattgtctgatacatacagccgccacaggcaggaaagatactgcagaccggctctcttgtctctaatgaagatttctccaacacttcaagaagtcttccttctgcatttcctcttttaaatttatttatcataaaacggatcttctgtcccggaatcccatttttcacagtaacatactgttcttcctccggaacaaatacaatccccttgtttgggaaatctacacgttcaataatcccctcgtagatctgaccttttttcatcctaatctcctatcaattctaatctattttaacagaaaaacagacaggatggtttcttctctcaccctgtctgcacttttgcaattcactcaagaattatacctgatcatcctcgctgaagtaatcatcaaaatcgtcatcaaaatcatcttcaaaatcatcaagataatccggtgatacgaaacgatatactgcataagcgattgcagctactgctgctactgctccgatgatagccagtgtccagattactgtattcttctgcttctcagcctcattcttatgaagaatctcgttcaatcttgtttctgcaatgatgtcttctattctcttgttcatattaacacgtcctttcttcaccttttgcggtgacagataatctgtgtttattataacacctgacgattcatattactactgatttatcatttttttataactttctcatacctttacaagcttggcaaatttggcaaacatcttacgtgttccgacactgtcaaattcaatcgtaacctcgtgatctcttccgccttctttgatctcagttacagttccttccccaaacttcacatgacgcacacggtctccggcctcatatccaagtggaccatttccacctgctgccagctgactgcctttctgcaaggatgccagtgcctgatttcctgtaagtggcttacctgtcccctgattcttcgcaggtgtcattccgccaaatgttcctccaaatgcctgtgccctgaacgcttccctggcacgtgcatatgtattctgctgtgctggcatctccgtctcctgggtaaacttcttgtttcctgtatcaagcagttccctcgggatctctttcacaaatcttgacatcggattgtactgtgtctcaccgtgcaccattcttctgcgcgcacttgtcaaagtcagttcctgctctgcccttgtgattccaacataacaaagtctccgctcttcttccagttcttctctgtctcctgcattaatactcatatatcccgggaaaagcccatcttccatccctgcaagataaacacgtggaaattcaagtccctttgcactatgtaaagtcatcagaacaacatattcctggtcttcatccagactgtcaatatccgcaaccaaagcaacttcttcaaggaatccgctcaatgttgccttttcatctttatcctgacaactttcctcataagttgccgctttactgatcagctcgtctatattctcttttcttgttttcgcctcttctttatcttcattttcaaggctttctatatatcctgtcttctcaatcacttcctgtaaaagatctgtgatgttcatctcttctgccaacgtcttaaaatactcgatcaatgccgcaaaagagtccagttttgttgcacttcttcccactcctgcgatcagctccggtgccagtaatgcctcataaaaaccaattccacgttctgttgcagactcctgaatccggttaattgttgtaagaccgattcctctctttgggacattaatgattcttctaaccgcaacatcatcacgtccattgtcgattgtcttgagataagcaagaagatccttaatctctcttctcgcatagaaatttacaccgccgacaatcttataaggaatattcatagcaataaatttctcttccagcagacgggattgtgcattcgtacgataaagaactgcactgtcattataggaacctccctgtctgacagcacttttgatatcttcgcctatgaaatccgcctcatcaaatgcagtatcaaactgacgcagacggatcagttcaccttctccattctccgtccaaagtgatttctcctttcttccgcggttattcgcgatcacactgttcgctgcattcagaatattccctgtagatctgtagttctgctccagtttgatcacctttgcatccggaaattcatgttcaaagtcaagaatattccggatattcgctccacggaacttgtagattgactggtcatcatctccaacgacacaaagattcttatattttcctgcaagaaggcttaccagctgaaactggactgtatttgtatcctgatattcatctaccataatatagcggaatctttcctgataactctcaagcacatccggctgtgtctgcaaaagctgtaccgtctttacaagcagatcatcaaaatccagcgcattattcgccctcatctgcgcctcatactcgcggtaaaccttagcaatcttcatctttgcaaagtctcctccggcattcagttcaaattcatccggaaggatcatctcgttctttgcagatgaaattgctgaaagcagacttctttctttaaacactttcgtatccacatctactttccgacagacttccttaattaatgtcttctgatcatctgtatcatatatagtaaaatgattctcataccctaatctgtcaataaatcttctcaaaatacgcacacatgcagaatgaaatgtactcacccatacactttctgctccaaaaccgacaagattatccacacgttggcgcatctcttctgccgctttgttcgtaaatgtgattgcaagaatattccatgggttcacgccacgttctccgatcagatatgcgatcctgtgcgtcagaactcttgtttttcctgaaccggctccggcaaggatcagaagagggccatccgtgtggtaaacagcctctctctgcggttcatttaatttatcataaatgctcatctttccactcctttaaagttataaagatatctgtaaatgtattcccattatcaaacacacgttcctgtttgtcaactacattttccggccttcttatcttttgcttgctatctagttttaaatactatataataaatgtattgaggtgataacatgaatatagacacaagtaatctgttaaacagcattttggaagaactttcttctttaagttatgtgcatcccggcgatgttccgaatattgatctttacatggatcaagtaactacttttatggatgagcaactggcttcgaccaaacgttaccctgatgataagattctgacaaagaccatgattaataattatacgaagaacaatcttcttccacccccggtgaagaagaagtattccagagagcacctgctccttctggtcttcatttattattttaaaaatatcctttcaatcaaagatattgagacagttcttgcaccgctcacagagaaatattttccggatggaagctcttttgaattagcgaatatttacaaagaagtctgcaagattgaaaaagaacagctggattccatcaaagagaatgtaactgctacttatgagaaatctgctgagactttcactcatcttgctgatggcgaagataaggagatcttacaacagtttgcatttatatgcagcttgagttttgatgtatatatcaagaaaatgatcattgaacggatcattgatgacctctcttccaagtcttcaaaaaacgaagagaaaaagaaagggaaataaacatttctgtttaaaacgagatacagcctgcgaaagactttatcaggatcttccgcaagctgtatcttttgattgataaaaggtattttattgtaagcttaattcttaagtgttattcttccgttccattctcttcctcagcaagccctacacgtttgaaaaccatatcatatccgtcattcccgtaattaagagaacggttcacacgactgattgtcgcagtggatgctcctgtcttctccgcgatctccaaatatgtcttctgttcacggagcattcttgccacttcaaatctctgtgacaatgaaagcagctcattgatcgtacagatgtcttcaaaaaatgtataacactcttctttattctcaaggcttaagattgcctgaaacaaataatctactgcctcggttctgatcttcttactcatacgaaacaatctccttctcaaccggctaattatatgatggcttacggcataccataaaccataacaataccttttgccttctcaggccactttttgattttaacacattaaatttttaaagtccaccatttcttataaatttaaactaaattcttgcgcaattttgatttttttctaaaacattttatgtaaaacacacttttttcgttgttcttcctcttttaagatgctataataaatctgttataaatattttgatacaaaagagaggagtacatgattaatatgaagtgcccaatatgtggaaaagacctggatttgcagaataagcagattggcaccagcgaaaacggggatccaatctttaatgaatatgcaatctgccatagctgtaaaaagcaatggaaccttgataaacaacgtgcaaagaagatcgctgccaagaaagccgcagaagagaaagcaaaagctgaggctgaggcccgcgctgctgaagagaaggcaaaagctgaagctgccgcccgcgctgctgaagaaaaagcgaaagctgaagctgctgcccgtgccgctgaggagaaagcgaaagctgatgctgccgcccgtgccgctgaagagaaacgagctgcccgcagagaagcaaaagcccgcgcccgcaaagaagcgattgcccgccttgctgctgacaaagggatttcagaagaagaagctgaacgtattcttaaggagagagccagagcccgcaaagccgccgcacagaaagctgccactgatgccactgccactgataattccgaagagcagaaatatgggaacattccagcggaagaaatccgtgataagcgtgaaaaagcagttcgcaagggatacgaagatatgcttgcaactgaccctgacagtaaagctgccaagaagaaaaagaaagaggaagccgaaactgcgaaagcaaaagaagatgtaaaatccagaaaaatggatgactatgatgatgagaaatcctctgatgatgaagatgatgatgaatatgaatacgtagacgaatatccacgtttcagacctggacgcatcatccttggaatcatttccctgcttgcatttggtttctgtatttataaaggtttcgtaacaggactcagcacatcaggagctgacgtaacttctgctccaggcatgaattatgtcattgttgctctttgtatgcttgtcactgcactgttatacttcatcatgaataaccgtgatacactttttgcattccttatcccgatgattgtctatatcggtagtgctgtttttgctttcctgaaacatggagatgaattcgagcttctgattttagccggtgtaagtggtgtacttgctgttatttcactgattctcgcaattgcttcccgcggtggagatgattacgatgatgaagatgattacgacgatccatttgaagaagaacacgataattaaaatcgcgttgtaaatctttttggtttctaagaacaatttatataagataattacaagggagtatcattttgcgatacttccctttttttgtcctaatatgcattttttatatcatatatctaaaatatttttaggtgtcaaaaacttttttagaatagttgttgatttttgttgaatatgtgataaaatataaccataggtatctttatataattaaaaatacacaacaaacacatactcctcaaagatttttctttggggattttgttacaaagaaaggagtaactgacatggcatcatttatagtaaatggtcaggaagtctcaccttcaaagaatcagaaactgttacggttcctgcgtgatgaactgcacattacctctgcaaaggatggttgcagcgaaggcgcttgtggagcctgtactgttatcattgatggacagacttgcaaatcctgcgtacctgacacagattcattggccggaaagaatgtcatcacagtcgaggggctttctgattgggaacagaaagtttacacttatgcttacgggaaggcaggcgctgtacagtgcggattctgtattcctggtatggttatgtgcacaaaagcacttttggatgtaaatccggaaccaaccgatgatgagattcgctatgcgctgcgcaacaactattgccgctgtacaggatatgttaagatcatggacgcggtacgtctggcagctaagattctgaaagaaggagttttaccagatgacggagatcctagctggactcttggttcccgtgtttctcgtatagatgttgaagaaaaagtgcttggaacaggtaaatatccggatgactattatccggaaggaatgctctatggcgctgctcttcgtagtaaatatccacgagctcgcgtactttctattgatacctctgctgccgaggctctgcctggcgtagaagcggttgtaacagccgatgatattcctggggagaataagatcggacacttaaaacatgatcagtattcactgattccggttggtggactgactcattatctcggagatgcaattgcccttgtagctgcaactgacatggcaactgtagaaaaagcaaagaaacttattaaagttgaatatgaagtacttcctcatgtgcatacagtggaagaagctgctgctccggatgctccacttgtttatgatgaagaagagactaacgtatgtgcttataagcacatcagccgcggaaatgcggaagaagcaatcaagaattccaagtacgtgatctcacatcactttgagacaccttggactgagcatgctttccttgaaccggaatgtgctgtttctttctatgatgaagacggtgacattttcgtatattcaacagaccagtccgctcaccagacattgcacgaagttacacttatgcttggaacagataaagtaaaagttcagaacgcattagtcggcggtggtttcggtggtaaagaggacatgactgttcagcatttaagcgcattgcttacttacgtaacaaagaaaccgatcaagatgaaattatccagagcggaatccttgcttgttcatccgaaacgtcacccattctacatggatatgacaatgggatgcgatgagaatggagtgatccagggtgtaaaagcgattgttaaatctgacacaggtgcattcgcttctcttggtggcccggttcttgaacgtgcatgtacacatgcagcaggaccttatcattatgaaaactttgaaattgaaggaactgcttactatacaaataacccacctgccggagcattccgcggatttggtgttacacaaacttgtttcgcaacagagacacttctgaacatgatggctgacaaggtaggcattacaccttgggagattcattaccgcaatgcgatccgcccaggcgaagtacttccgaacggacagattgtagataactctacaggtcttgtagagacactggaagctgtcaaagaagagtatgatgctgcacttgcggccggtaaggctgttggccttggttgtgctatgaagaatgccggcgttggtgttggtatcccagatacaggacgtgtaaaattaattgttgaagaagatgaaaaacttcacatcttcactggtgcttcctgtatcggtcagggacttggtactgtacttgtacagatgatcgttacaaatacagatctttcccatgatgatatcgtctatgagcgaagcaacacatggatttcacctgattccggtacaacttccggttctcgtcagacacttgtaaccggtgaagcgtgccgcagagcatgtgaaaaattcatggaagcaaaaaacagcggtaagtccatgaaagatatgattggagaaactttctacggagagtatctcgctaagactcatccacttggtgcagatgtgcctaatccgatatctcacgttgcttatggatatgcaactcaggtctgcatccttgatcctaagacaggtaagattgagaaaatgattgccgcacacgatgttggtaaagctgtcaacccactttcctgcgaaggtcagattgaaggcggtgttgtaatgtctatgggattcgcactcagagagcagtatccaatcgatgaaaattgtaaaccaattgacaaatatggttccttaggacttttccgttctcacgaagttcctgagattgaagcaatcgttattgataaacctggtctggatgttgcctgtggagcaatcggtatcggagagatcacatccatccctactgctcctgcaatcgcggatgcatattgcagatttgacggagaaagacgctacagccttcctctttctaacacaccatacgaaaggaagaaataatcatggcaattaaaaagagatttccttaccgggcagctctggtttcctgtaacggtggctgccgcgcagccggctctgaagacggcggatgcaaagatggctgcatcggatgtggagcctgtatagaaaaatgtaaattcggcgcgatttccatgaatgaatatggcgttgccgaagtagacgaagaaaaatgtattgcctgtggacagtgtgcaaaagtctgtccacagaacctgatcaagattcacgaatgtgcaaactacattgtagtaaaatgctctaacaaagaaaaaggagctgttgcacgtaaacagtgtgaagtcagttgtattggatgcggtatttgtgaaaaaacatgtactgcaggtgcaattcatgtagaagataattgcgcagtaatccaggaagacatctgcttaagctgtggaatgtgctctgtaaaatgtccaagacatgtaatccatgatctccgcggagtatttacagcagtaagataatacaaaagctatcgactacgataacaacacagatatgtgttaagttattgtaatcgatagcttttttatctactcatcttcatccagaaactcgatatcatcatcgtcatcaagataatctaaatcatccagatcattcaagtcatctaagtcatccggatcttcatcaaaatcataatcctctgtcgcatctgcctcatcagcagttacttcaatttcgacgtcttcctcccagtcttcctcgtctacatcaaacttctcttctttaaacttctccacttcatcctcttccagatcatcttcaagatcatcaaattcatccatgctgacaactgttgtgcccttgtcttctttcaggacattttccggaagactctctataatctcatccagctcatcaaaatcatccagattctcgaccagtgcccttgccttctcgacttcattttctgtagaatgttcttcacggatctctgcggctttaagtaaattctttttcttacgttttccggattccaaaagaagctggatccagatactaagtgcaccaattgcagcacaaagtgccacatggatcattccgtttttatatggctgcagataaaagatactgctgcccgctgccattgctccaaacacagaagaagaagcaatcagcataaagttatgaaacttaatagaaagcaatgcacacacaagaccaatacccgcacagattccatagataataaaatcctgtggtttcatcaaatgtacactgacaacaaagacgagtaccgctactgtcacaaatccaccaatctgcttcttccatgcaccaagcaccgccaatacaagtcccacacctgctcctgccgccaatgcgattgtctgatccagatctgcaatcgctccgaccgcaattccggctgcgcatcctgctgacaatcctgcgatcacagaccagaaacgtaccagtttcagccccgtcagacataacagtaccgctccggccattataacgatcagagaaataaattccatctgactcaaatgatgactgctttcattaagtccagccagaacaacatccaggtcaaaattcagaattgtatcaatcatatcatttacattcattatttacaccttcgtcccttactatttattactcactactgctcattttagcaattttttttactgattacaagtgttcatttcacctttccattgacttcttattcttctccacttaaaatagaagagaaatgctattgctgaccgcataatactgtgaacagcaataaaatgctaacataaaggagtttattatggaacagttaagaatacctgctggctatcattcccctcttacaattcgtgagacagaagtagccatcaaagaagtgaaagaccacttcgagcgtgctcttgcaaagaatctccacctgacacgagtgtcagcaccactgtttgtccgtccggaatccggtctgaatgataacttaaacggtgttgaacgtccggtttcctttgacatcaaagaacaggatggttctgttgcagagatcgttcattctcttgcaaaatggaagagatatgcattgaagaattataatttccattccggcgaagggctttacacagatatgagtgcgatacgtcgtgatgaagatacagacaacatccattctctgtatgttgaccagtgggactgggaaaaagtaatttctaaggaagaacgtaacacagagacacttcagtacactgtccgcaaagtctaccgggctctgaaagatacagaagaatacatttccagacgttacaactatatcgatcctcttcttcctgatgatatctttttcatcactacacaggagctggaagacctttatccggatcttactaccaaagaacgtgaaaaagcgattgcgaaggaaaaaggcgcagtgtttatctccaagattggtggcgtacttgcttccggcgaaagacatgacggtcgtgctccggactatgatgactgggagctgaacggtgacattatcgtttactatccggttcttgacatcggtcttgaactctcttctatgggaatccgtgttgacgaagactcattaaaggcacagctaaaagaagccggatgtgaagatcgtgcagaacttccattccagaaggcactgctgaacggcgagcttccatatacagtcggcggcggtattggacagtcccgtatctgtatgtattacttaagaaaggctcatatcggtgaagtacagtcttccctctggcctgaaaatgtagttgaagctgctgctgatgccggcattcaccttctctaaacacaagacagaccagccaattatatgataaaaagcagattcgaattctaccggagcatctctcctttgaattcgaatctgcttttttcattctcctcttattctacaatcagcaactgttctttctcttcctcagacaccctgttccaaaaaacattaaaatcatcaaattccggcaaatagatatctgccgtattccagatctgcgccagattcttgtcatttgccttatcataaactgctactgtcttaaatcccgcatgctttgccgttctcaaagcctggtaagtatcttcaaacacccaggtctgttccggctccgtatccagctgcaaaagtgctgcaaaataaatatccggctgatccttaccgcttccgatctcagatgctgtaaaaactccttgaaaataaggtaataccttcaatctgctcagagctgcttctgcattcttccggtcaccggttgttgcgatcaccataggaatcttccgctctctgaattcctccagatactgacgaaccccttctttcaatggaactcgttttgcataatagtcttccacttctttattcagtccctgtacaacctcttccactgtcttctccaggttataatgtgagatcagataatctgccgcctcctccaggctcatctcaaataatgtctcccccaggttcttctcggcctcaattcccaaatgatccagatacaattctccaagattctcccagacaggcatggaattgagaaggacaccatctacgtcaaatattacaccttttatcatgtcattcctcttttctgctatgcactacattataatctccctggaaacgcatgtcaaccgttactgttcacacgatgtgtgaccagcaacgcatctcgccattttaaatcgcctttggcgatgggcgagatgcattcaagccaaaacacgcatcctccgtgtcaatcagcggagtgattgacacgggagtgaacagtaactgtcaaccatcagaaaaagaccttctgccggcagatcaaccacttgcaaaaggtctttataaaatgctgttatttattttgtctcaaggatcttatcaacacttgccagttttacactcaatacaaatacttcagcggcaactgcaagttcttccggtgtcggataagacggtgcaatacggatattgctgtcatgtggatcttttccataagggaatgttgctcccgctcctgtcataacaacgcctgcctctttcgccttcgcaacgattgccttcgcacatccgtccagcgcatcaaaggagatgaaatatcctccgcgtggcgcgatccaggatccaatctcaagtccgccaagttctctttcaagaacttcaagaacagtctcaaacttcggacgcaggatatctgcatgtttcttcatatgttctacaattccgtgaatatctccgaagaatcttacatgacgcagctgatttaccttatcatgtccgatcgtctgcacacgcattgtgcttctgatatcctccaggttcgcatcagatgctgccattgccgcaattcctgatcccgggaaactgatcttggatgtagaagaaaacttgtaaaccatatccgggttacctgccttcttacactccatcagaatctcaatcagataatcctgtttatcttcatataaatgatgtacacagtaagcattatcccagaagatacggaaatcttctgctgccggcttcaggttcgcaaaacggaacactgtctcatcagaatatgtgattccctgtgggttagagtacttcggtacacaccagattcctttgattgccggatcactgcttacaagtttctcaaccatatccatatccggtcctgttgatgtcatcggtacattgatcatctcaattccgaaatgctctgtaatcgcgaaatgtctgtcatatcccggaaccggacataagaattttaccttatcaagcttacaccatggagtacttcccatgataccatgtgtcattgcacgtgctaccgtatcatacatcacattcagacttgagtttccgaaaatgatcacgttatctttcggaacttccatcatatctgcaagaagctgttttgcttcatcaattccatcaagtccgccatagttacggcagtcaacaccatcttcacaagtcagatcaacaccacttgtcagtgtatccatcatccccattgacagattcagctggtctgctgacggttttcctctggacatatccagtttcagaccttttgccttcacttcttcaaactgcgcctccaggccactctttaattccaataactcttctttgctcaaatctttatatgcagtcattgcaggaatcctccactttctttattttttcacttttgttattgtatataatttttgacgtttcgtcaatgggttcttgcattcttttttattttcttgtttttttcagctttatttccacatgttttgcatttcaaaaatgtttttcattcatttttcactgtattctgtgttatcactctatcccatcaggttttatctatgcattattgatttttcctctcctcctgtgatatccttagaaagtagattccagtcatcattccacttgactgtgaataaaaatcttatgattctatggaggtaataaaatgaattttacatttgcacacaataacctgaatgtatatgatcttgaaaaatcactggatttttaccagaaagctctgaatttaaaagtagaacgtgaaaaacttgccgatgacgaaagttttaagcttgtatatctcacagacggtgtgaccccgcatcttttagagctcacctggctgcgtgatatggatcgaccatatgaactgggagataatgagatccatcttgcatttgctgtcgatgatttcgatgctgcttacaaaaaacataaagagatgggatgtatctgcttcgaaaatccatctatgggaatttattttattgaagatcctgacggatactggctggaaattgtaccgggcaaataaaaaaagttttaaaaaaaggaatcagcatcactgattccttttttggttctaatatcttacataatatgtaacacgtacagaacttaccttaaccggtactcctgtctgctgtgcttcgatcatctgtccgccgccaatgtaaatcgctacatgtcccggtgtccagcagatatctcccggctgtggatcatttacgattgttcctgctgcaagaatatctccacttgttcttggaattgaaattcctgcctgtctgtagcaatactgtacaagtcctgaacagtcaagtccaactcccggtgtagatccgccccatacatacggaactccgatctgtgaataagctgcatttacaataatgcttcccttatctgcactatagcttgggcttggcgaggaagaacttgagctgcttgagcttgaactgctggaagaactactgcttgagctactggagcttgagctgcttgaacttcctgagcttgagctgcttgagcttgaactactggaagaactattacttgagttatttctattagaagaactactgcttgagttattcttcttagctgcttcctcggcagctttctttgctgcttctgctgcctttctcttagcttcttcttccgctgctttctttacagctgcatcaatcttaacatcgagatttgcgatttcactactcttctctgtgattgttgtattcagttcatccttctgcgcatcatactctgtctgtgtctcctgcaaatcagccatctttgtctcaagcgttgtcttaagatcttctactttctgaactgtcgcaacatactcttcgagcttatctctgtcataagaatgtacctgctgggaatattctgcctgtgtcagtacactggaaatatctccggatgttagtaccttctccactgtagcagtgcctgttccttcttcatacatgtacttaatacgaagcttcatggctgcatactgctgttcctgttcctcctgcgctgtcttcagatcttcctctgtctgagagatttcctcacctgtttcgatcagatcattctcaagatcagagatcttggtcataagtgaattcagctgtgtctgaagattacttacctgattctgtgtctcctgcttcttctgcttcagatcactgacctcgtcagcaagtaccggtgtaacagtcattgtacatgcaagtgttactgcaagaatcatactgcttactttttttaacttcatctttccacctatccttatttttatctagtcccccatgtgatgcattataatttttcatatcacaattcattgtaaatagttacattataattccacatactcatatgttataatacaacatctattgtgttttttcaacatatttctcgtaacaagagggtattttatttacattctacgttcaatattatagcgtatttatgtaatattttcaatagtttcccttacttttttcattttttcgtaacatttttgtaacaaaaaaatctggaaagttctctttattcttagataaactttccagactcctgtttcactgtatgatcttttattttctactgaatatataagtttgtatatcccatcaggctttcatctacttctcttgccacttcacgaccttcacggatagcccatacaacaagagactgtcctctgtgcatatccccggctgtgaatacatccttcacatttgtagaatattttcctgcctctgtctttacatttgtgcgttcattcacttctacaccgaatgcttttgttacataatcctgacttccaaggaatccagctgcgatcagaacaagatctgcatctacggtatactcgcttccttctaccggaaccatcattttccgtccggtcttcccatctgtcttactctcaagcttgataaggactgccttacagagatttcctttcttgtcttttacgaattctttcactgtcgttgtgtaaacgcgaggatcagaaccaaacacagcgattgcttcctgctggccataatctgtcttgcagactcttggccactccggccatgggttcatcggtgttctctcgtccggtgctttcggcatcatctccagctggagaacgctctttgctccatgacgaatagatgttccgacacagtcatttcctgtatctccgcctccgattacaattacattttttccttttgcagaaatgtagcttcctgttttaagcttcatgtcatttgcccatagtgctttcgttgttgatttcaggaaatctactgcaaaataaattccctgtgcatctcttcccggtgctttgatatctcttggatttgatgctccacatgcaaggatcacgcggtcatattctttcaggatatctgccgccttcacgtcttttccgacattacatccagtccggaagataattccctcttcttccataatcgcaatcttacggtcgataatctgtttctccagcttcatattcggaattccatagcggagcaatccgcccggtttgtcctcacgttcaaaaacagttacctgatgacctcttctgttcagaagatctgctgccgcaagtccggacggaccggaaccaatcactgcgactttctttcctgtacgcactttcggtggatttgcctttgcatatcccatctcatatgcattttcaataattgcatattcattactttttgatgcaactgcttcctgattcagtccacaggtacatgcattttcacacagtgccggacatacacgggaagtaaattccggaaaattgtttgtctttttcagacgtaaataagcttccttccaatttccattgtagatcaagtcattccactctggcacaaggttgtgcagtggacatccactggccattcctgcaagcggctttccagactgacagaacggaactccgcacgccatacagcgtgcgccctgaagttcctgttcttctttgctaagaggcgtatggaactcattgaaatgtttgatgcgttccaatgggctctctgccggtttatcctgtctttcataatccataaatcctgtcggttttcccatctctatgcctcctatcttccgttcttgatcatattaaatgcttcgatttttgctttttctctactaagtcctttttcttccatctggatgatcgtggacatcattctctcatagtcttccggaatgatcttcttgaattttggcagatattctttgaaattatcaagaatcttcttacctacctcagagtttgtataagcaacatgctcctggatcattccttttaattcctgtacatcatacttatctgtgacacgttcaatgttgaccattgctttatttactttacgatacaggctgttatcgagatcgattacataggcaataccgccgctcattccggctgcaaagttctttccaacctgtccaagtacaacaacacatccacctgtcatatattcacatccgtgatctccgacaccttctacaactgcgcgtgcaccagagtttcttaccgcaaaacgttctccggcaacacctcctacaaatactttaccacttgtagctccgtaaagagcaacatttccgatgataatgttctcatctgatttaaatttcacacctttcggctggcaaacaaccagttttccaccggaaagtccttttccaaaatagtcattactgtctcctgtcagttccagtgtcagtcctcttgggataaatgctccaaagctctgaccgccggcacctttacactggatcacatagctgtcttcttccagtccttccggatatcttcttgtgatctcagatccgaaaattgttccgaaagtacggtctgtatttgtaacatctacttcaagtcctctcttttctcctctttcaagggctggaagaagctgtttcaatagtactttttcatccaatgtcttgttaagttcaaaatcatagactttctttggattaaagataacacctttcttctctttcgcatatggattgtacagaatctgtgacagatccagtgttgcagcacgctctgatgtcggaacgtcttttactttcagaagatctgtacgtcctaccagttcatccactgtgcggacaccaagttttgccatatattctcttagttcttctgcaataaaacgcataaagttgacaacatattccggttttccgctgaaacgttttctaagctccggattctgagttgcaacaccaacaggacaagtatccaggttgcagacgcgcatcataacacatcccattgttacaagcggagctgttgcaaatccaaactcttctgctccaaggattgctgcaatcgcaacatcacggccactcatgagcttaccatctgtctcaatacggacacgctcacgcagaccattctgaatcaatgtctgatgagtttctgcaagtccaagctcccacggaagtcctgcattctgaatcgagcttctcggtgctgctcctgttcctccgtcatatcctgagatcaggataactccggctcctgcttttgcaacaccagcagcgactgttcctacacctgcttctgataccagtttcacagaaattcttgcatttttatttgcatttttacagtcatagatcagctgtgcaagatcctcaatcgaatagatatcatgatgtggcggtggtgagattaggctcacaccaggtgttgaatgacgagtcttcgcgatccatggatatacctttccacccggaagatgtcctccttctcctggttttgctccctgcgccatcttgatctggatttcctgtgcactgaccagatatctggatgtaactccgaatcggccggaagcaacctgcttgattgcagagcatctgtttgtgtcaagacgttcaatatcctctccaccttcaccggagtttgatttaccatgaagcatattcatggcgatcgccattgtctcatgtgcttcttttgaaatagatccataggacatcgcacctgtcttgaatcttgttacgattgaatctacgctttctacttcatcaagcggtacactcttcttcgggaaattgaaatcaagctgacctctcagattgatcttcttgccttcctcatcaaccatctctgtatactgcttgaacatttcataatcaccacgtcttgtggactgctgaagcatatggattgtctgtggattatagagatgttcttctccgccacttttatatttatgttttccaacactgtccagtgtcgtatcaacctgcagtccaagcggatcaaatgcttctgtatggaatgctgtgtaatcttctgcaatttcttcaataccgataccaccaacacggctgactgtatctgtaaaatagcggttaataaaatctgtcttgagaccaattgcctcgaagatctttgctccctgataggactggatcgttgaaattcccatcttggatgcaatcttaataattccatgaattactgctgagttataatcatctactgctgcataataatctttgtgaagcagattagactcaatcagctgacggatcgactcatgcgcaagatatggattaatcgcacatgctccatatccaagcagtgttgcaaaatgatgaacctctctaggctctccactttccagaatcatcgcgactgaggttctcttctttgtacgtaccagatgctgctgcagtccggatactgccagaagtgacgggattgcaacgtgatattcgtctacctcacggtctgtcagaatcaaaatattagcaccctcacggatcacacggtcaacttcaataaacagatactcgattgccttctcaagacttgtgtttttataataagtgatcggaatctctgcaactttgaatccatccactttcatatttttaattttcagaagatctgtattggtcaggatcgggttattgactctgagcatcttacagttctcttccttctgctccagaaggttaccgtctgttccgacataaattgttgtagatgttacaacttcctcacggattgcatcgatcggtgggtttgttacctgcgcaaacaactgtttaaaatatccgaacagtggctgacgtttctgcgaaaggactgaaatcggtgcatccattcccatcgctgcagttccttcggcaccgttctttgccattgtcagaatagaagttttcacgtcttcataagaatagccaaatgctttctgaagctgtgtacactcttcggcagtatactttggcacatccttattcgggattttcaaatccttcagctgaatcaaattactgtccagccattctccatatgggaactgatttgcatatttttcttttaattcctcatcatcgatcacgcgtcctgcaacagtatcaacaagaagcattttgcctggatgaagtctttctttcatcacgatcttggatggatcaatatccagaactccaacctctgaagaaagaatcagattgtcatcatctgtaatgtaatatctggaagggcgaagtccgttacggtcaagtacggctcccataacatctccatctgagaacaagattgacgccggtccatcccatggctccatcattgttgcataatactgatagaaatctttcttgttctgggacatctctttattgttgatccatggttccggaatacagatcataactgcaagcggaagatccattccactcatcaccatgaattctaatgcgttgtcaagcattgcggagtcagaacctgaagtattgattgctggaagtactttgtgaagttcgcctttcagacatcctgcctccatcgtttcctcacgggcacgcatcttatctgcattaccacggatcgtattgatctctccgttgtggaccataaagcggttcggatgcgctctctgccagctcggtgctgtgttcgtactgaatcttgaatgtaccattgcaattgcagaaataaattcttcatcctgcagatcttcaaagaaaagtctcagctgtcctacaaggaacattcctttgtaaacgattgttctgctggaaagtgaaacaacataagtatcatcactgctctgttcgaagattcttctgactacatacagtcgacggtcaaagtcgattcctttctcgtattttgcaggacgttcaataaatgcctgcataatacatggcatgcaatctactgctgtctttccaagaatgtccggatgaatcggaacttctctccagcccaagaacttcaatccttctttttttacaataacctcgaaaatctttttcgcctgattgcgttttaattcatcctgcggaagaaagaacatacctacaccgtaatctctttcatctttcagcttgatcccaagtggctgacagacttttttgaaaaatccatgaggaatctgtgtcagaatacccacgccatctcctgtctttccttctgcatcttttccggctctgtgctcaagttgttctacaatactcaaggctcctgccactgtactatgtgtctttttgcctttgatattgacaattgcaccaataccacagttatcatgttcaaaactttcgcggtaaagaccacgattctgactttccatttctttcctcatagtcgctatcctttcttcctgtaatctaaagtttactttaaaatcttctttgtccggcgcattcaatcatttctttctcacgtcgtgtaaaactttttctagaatatacacccttttacctaggctgtaaatagggaaactcttgtaaattgtctgattatttgattttttattatttttcttttaatagtcagattattttgattttcttataaaaataatattaattattaagatttctgtttttctttgattttatttaataaaatactggattaaaaagaaaatgcgcgacaaggtttcgcacctcatcgcgcacaatttaagattgtatttttattagtacaatttatttcattcgtattttttcactattcttctgttttctgagtactcaccggatccccgcttctctgaatccacacaaaacaagctgcacagataaatgtgctgatgatcactgccactgccattttaaacggttctctggcaagccatttaaatactccgatatctgtaaagatcaaagagcccagattcaaaacaacgtgaagcataatcggagctttcattgaaccaaatttctcataaatatagcacagaagaattcctaggaggaaagtgtaaatcatctgtaccgtgttggtatgtgtgactgagaaaaacagtgctgaccagattgccgcataataaaatcctctggtctcccggtacctctgatagagcactccgcggaacataaattcctctgcaatcggaattacaaatccaaatacaataatctggaccacaaaatctgctgaatacatattctgtgcggtctggatatactccggatcaaccaaaacggcctgtgccatagcggacagacatgtagcaccaatacttccgatcactcccatcacaaaaagtgaccagtaattcttcagtggcttttgaacccccatccgctgtatccctgcaatctgctctttctttcgatcgataacaaacaatgtaactgtcagaaacaacgttgctgctgtagcaatccctgcaatcgcaatctgacctcctatgattttatcaaacgcaggacttaacacttcatagtacttattcatcatttcctgataattaagaacttctccactttgtgtcatcctggaagatgcttcccccataaaaggaagaatgattataaactcaatcacaaattccatcaccagctggattccccagaatccaagtaaaggaccggcagctctccagaaggagcgtctcggatcatttttcataagacaattcctccgctatcttctgaatccactctctgatctttccggcttcaccttttacagttccctgaaccatctccggctttccgcctccccgtccttcgaatgcagcatttaacattttggaaaatgcacgaagatcctgggttctgcttccgatcacataacggtatcccgctgcatcatttccataaaacacagcacaaagaattctttctttttcaagcacttcattcacatactgacgcatggcatccgcactgatatcctctgaaaacatacagaccgttttttcttcttccggaacagactgcgcccagacgtgtacaagctggcgttctttctccaccagtatccgtttcaaagaatccagctcttctttcaagtgtcccactgcctctgctgtctcatattctttcgcacagagcgacgctgaaattttcctgttctgttcctgcttcttctcataatctgtaagtgcacggcttccacagagcattgtcacacgaacgccgcctttgtatcgctgcatattaacaagcttgatcataccgatctctcctgtgcgttcaacatgcggcgcacagcacgcacagatatcatatcccggaaccgatacgatacgaacctgtccctcaatctcaatcttactgcggtaatccagttcttccagctcttctttggatggataggacacttctattatcagattcttccacactgcacgatttgcttcaagttcaatctcctgcagtgcttcttttgatatctctccatcaaaatccatcgtacaatcttctgttccaagatgaaacccgacattgttgaaaccgtatcttgcatgcacgattccggaaacaatatgctctccggtgtgctgctgcatcttcataaatctggtctcccagtcgatctctccttcaacaatctctcctgcttcaaacggctgatctgtaatatgcagaattcttccattcttttcccgaacatcagataccttcgcatccttcagttttcctgtatctgcatactgtccgccgccttccggaaagaatgctgtacggtcaagttctaccgcatagcatccttcctttttctcatacggctcacattccagaaccattgcagtaaattttgaaagatggctgtcattgtaaaacagtttttctgttcttgtaccatccatcaatccattttctgtcataattcgtattacatcctttccggagctgtaaatccaagaagatcaatacaagtctcaagcacttttttcgcaagtgtaagaagtgcaagataacctttcttcttctcttcgtcttcttctgcaagaatctttgtctcatgatagaacttattaaagtcgttcgcaagatcatagatatatgcacacaacttatgaggagctgtctctttatatacattatcgatcacttcattgaatttcactacctgaagcatcagagacttctctgcatcattctcagccggtctgatcgttccgtcaagaactccgccattctcagcatatttcttgagaatagacttaattctaacgattgtataaagaatatacggtcctgtatttccctcaaaggaagtaaatctgtcaacatcaaagatataatctttagaagcctggttagaaagatctccgtacttgatcgctgcaagtccaacttcttctgctgtacgtcttgcatcttcttcctctactgtacggttgtccatgatcttcttatacatctcatcatcaatctcacggatcagattctcaagacgcataacaccgccttctcttgtcttaaacggcttaccatcttttccgttcattgtaccaaatccaaggaatgtaagttctgtctccggttttacaattcctgtcttcttcgcacaacggaatacctgcacaaaatgcagttcctgacgcttatcaacaacatagatcacctgatctggatcatacagtttctcacgttctaccagtgtagcaagatctgttgtatcatacagcgcagctccgtcagatttcagaatcatacacggaggaatctctttcttatctgtctcttctgcaacgtctactacaagcgcaccctcatcataatgtgcgaatcctttctccttgagcatctcaaccatatccggaatatatgcctgggcatctgcttcacctttccagagatcaaaatctacactcagtcgctcgtagttcttcttcaagtcagttacagacacattcatgatatgtttccagattgcacgatatcctttatatccattctgtaacagataagttgcatgaagtgcttcttctctataatcgtcgtgctcttttgcataagcacttgctgtaggataaatctcttccagttcactgatcgtaaatggtgcttcttccggatattctccttcaaaactctcatcaaaatacgggagttccggtttacgttttttcagctctgtgatgatcagacccatctgatatccccagtctcccagatggatatctcctgttacatcatttcctttaaaacggataatacgtttaatactctctccgataatcgcagaacgaagatgtccgacatgcaacggttttgccacgttcggtccgccgtaatcaataataacttttttcggattcttttctttttcaacaccaagattctcatctgctgccatctcattcaaatactctgcaacaacttccggtgccagcttcaggttgataaatcccggattcaccgcttctgctgatgcaaaatacttgctatctgcaagttcttccacaactgcattcgcaatcatgattggagccttcttatatttcttcgcacctgccattgcaccattacactgatattcacagagatccgggcggttggaaagcgtaactcttgcaagctcttcatcatatcctgctgctttgaacgcttctttcatttctattgtgatcatttccagtaatgtcttcaaagtttcacactcctctttacttttcgtttgtcttttctgcctgacggcaattttattaaaacaagtctgcctcccaacttttctggagacaaacagccactatttattctatcatgtatccaacagaacagcaagcgttactgtgaacagtaacggcaacgattcaaattgatctggactgcccccaaaaccaattgacataaaaataaccaatacttataatgtaaccacggctttacacatacagtttctacatcctgtatgatataaaatcagacagaaaggatatccaacaatgttaaaattaggttcacacgttggcatgagtggaaaagaaatgcttcttggttctgcgaaagaagccgtttcttacggtgccaatacatttatgttttataccggagccccacagaatacccgccgaaaagaaatcagtgaattgaatatcgaaccagcatgggaatatatgaaagaacacggaattgatgaaattgtcgttcatgcaccttatatcatcaacctcggtaattcagtaaaaccagagacgttctctcttgccgtagaatttctggcaaaagaaatcgaccgcacgattgcctgcaggagccacactctgatccttcatccaggtgctcatgtaggtgccggtgtcgaaatcggaactgcacagatcatcaaaggactcaatgaagttctcactgctgagactgactgctgtattgcccttgaaacaatggccggaaagggatcagaaatcggacggaattttgaagaacttgcccggatttatgatggagttgtccagaatgataaattgagagtctgctttgacacttgtcatacaagtgacagcggatatgatatcatccatcattttgatgatgttatggagtcttttgaccgtctgcttggaaaagatcagattgcagtcttccacatcaatgacagtaaaaatattccaggagccgcgaaagaccggcatgaaaatatcggctttggagaaatcggttttgatgcaatttctacaattgtccatcatccggatttcgaatctgtaccgaagatccttgagactccttatattccttctgtaacaaaagcaaagaaatcttatgccccttataagtatgagattgaaatgctaagaaacaaccggtttgatcctgaaatgaaagaccacatccttgcagattgtgaataaaaaactatatgaaaaaatcctgttattctcagccatctgaatgtgctgaaataacaggacttttttatcctatatatcctatagcgtctgagcggagtcgaaccgccgcacatgcctccggagagcatcgctctatccactgagctacagacgcatctcggttgttagtgggaaaatttaatttcgtacagctaacaaccttttttatcctagcacaattctgtataaatgtaaagtggcaaataaacctctaactttctgcggttaatcttttttcactgcaagcagaagaattaatatccctgccccaagacaaagcattgcccatgcacctgcctgttgtgaatctccggtctttgcagcctcttcccttatcgtttgttttggacataccctgacattccagttcattgccccattatcctcttcccattttggcagctggacaagaaccggctgaacctcgtattctgattcatcttcaacatagatcagataaactcctgccctcagattcgtaagggttgcttttccatcacaatccgtcctgcacaatccatcactataatgatatttactcaaagtccgcgccagctcttcttgttctctggcataccttacctcattgagatccacgcctttatcttcatatcttttccccatctcgtaagcaccatcaacaagagatgccactttggaatactggaatgtaacaccttctctcttaatttgttctccggtatcttcaatacagatttctatatttcctgtttctgtttctgcaaacgccgggttctttactgctaccaccagaaaacatatcaaaagaagaagaattccgcatttgattttcccattttgccgtcttttgcatctttcttttttgtctcctgcttttctttcttttacgtttctttctcctgtagtgcttacatttccttttctggtttctgtttctttttctctttccctcacaatttcttttttctcgctttctttttattctttcaatcacaacatataccaaaaagagaattggaatcattgtgaaaatcatttctctgacagacggacgtttctttttgattttctcttcttttttctcttcatacacaacccgctttccagtaatcactaaccgatgggtattaattccatatggggtacatgtgacaagcgaaaccagatcttctcccggtctgatttccagactttctacctcttctggtaagattacatttatttcttctactttatatgcgagtttttctcccagtacttccagaaagaactcatcgccttcctttaattcatccagacgagtgaaaagtctcgcacttgcaagcccacggtgtcccgtcatcacacaatgcgtattttctccccctatcggaagactactgtccatcaaatgccctacaccttccttaagtactgcctcgctggttccatgataaaccggaagcctgagatctattgacggaatttccagtacacacatcattcctgtctgtattttttcggcatttaacagaccttcatactcttccatctggtcaggctcgctttgttccctgactcctttcgattctgcccaaagctttttattatattcatcagcctgattccttaattgttcaatttcatctcctgttgtctgttccacaacctgttcatatgttgccaacacattttgtgttttcttctgactataccagccagtcaaaagaggtatactacacaaaagaactcctatccatagtaaaagatctgactgtaatctattgtttttcctttgcattttttctgtttcttctcattgctcctgcaagaacaagaacacttccggttgtaatacagataacagctgctgaagaacctgttaccggcagtttttttccaactgtattaattactgtcagattagcagatccttcgccttcatttgttgtcagactgacttctgattctttccagtttccgttaataaattctttgatctgtgcagatgtctccagttttttcaatcctttttctgtttttccgtctccttttacatatgcgtttctatcatttggaaaacttgcttttatatttaacacaatcggctctgtcagcagacggtatcctgccggtgcctctgtttctttcagataataggtgccactatctaatccatagatcacaaatgttccatcctgaccggatttcatctccaccgcattttccggctgctttccatctgtatggtcgtttcctccaagactgtcccggttaattacaatgtacccaccttctccctgttttacatatacttcattttttaatccagcgtcagaataaagtctgaacctggcattttccagactttgtccatggttatttgatttcaatgcattgattttataagtgaaacaaacaactgtatcccacggtgtatatcctgtacttcctctcaccgctgaatccggatcatttgaaaattccagccgaacatcgttttcaaatcctggacgtcctgtatttttcgctgccttttcattcaatgttgcctgataggtaagcactattttctgtccatatttattttctcctgcttcatttttacgattaaactctctgtctatgatttttttcatatcagaaacaatgacctgaaacgtatctcctcctcccggagcttcctttacttcaaattcaccctctttcaattcataataatttcttgcatttgaactttcataaatccggatggctacagaatcctttttgaaagtaagtgcttcactcatcacatcatgccatgcgtaataataggtgttgtatccgttaacatcaggcatatttgactcataccgatacggaacagtctgcccgatttcaaaatcagccaaatcattccatccctgatttccaactttgtcctgatcatcatcttcccggatcttttttgtcacaaccggatagtctgattttatgttgagattcatttccggattagctgtacttaccatacacaaagaggccgccgaattcgttccttttacctctgtcacttcatcaataatataatatccatacggcaatcccttaatttcaaatgaattgtctgcttttgtacttgtcacttcaacagattgacctgtttttccatttctctgtagatgggttcttaattcttctacaaaaacacgatattcactgtatgctccttccttttcctgagcggtctgcgcaccttctgtctgatgcgtattcaaagactgaatatagtcgatcacctcatactctgttacatttctctcatccttatgaatccgctgtcccacgatataacaaacaaatttcttgtattccggattaaatgtataattaatggattccattcctttcgcattttctgcctgaaacaactgatataccagaaatctttttcctttcaggctctgtccgtcatttcctttgattgtaatacttgccggtccattgttaagatttaaaaccccatttgtagttgctgctctttcctgtacttcattttccgctgcatatacagatttgattccagtcacacctgttgttccagaagtacagagtaccgcagctaaagtcatcatataacaaattttcatcattctttttttcattttgtcatctcctcattttcaccgttttactactatctttttttctgtaaatcattgccatgattcctacagctaaaattcctgtaagtaacacaggttttcctgccgatccagtatctggaagcttctttcccgtctgatttatgatcttcattttcacattccactccttaattgaaccttcaatacttatcttgctgtctgcagtatctttgctgctgtattcttttccattcacaaccaacagacacttcccttcttccggattactttccagacagatttcatatacaatatctgcatcatctgatgttttcggaattctgtaacctgtcggcgcttttgtttctttcatatagtattttttctttacttccagattttcgaacattgcaattccattcccatccgtcaacacccggtcaatttctttctggcatgcctggtcttcatataaagtaaactcagctcctgcaagtgcaacacctttttcattttcctttttcagctcaatcttgtaacaggccggcttatcttctatcgtcactaccgcaattccatcctctgtatattcgataataacctctccttcttctgtatttacctcagataaaaattctgttttcccgctctcatcaacttgaaaaatcagttcattattatttgtccgatacccgtccggtgcttttacttcttttaatttgtgcgttccctgagataatggcattactttcagagtccctttttcatccgttgtgagaatcttttcacttccatccggtctgatatgcttaaactgcgctcccgaaagaggatgtcctgtctctgttgcttttttcaccaaatggatctggaaaaccctgtccggtatcgtagggttctgatatacatttattttttctcccgtaccttctggttttatctggcaaacaaagacttcctcattcaggaaatacccttttggcggttttatctcctgaattgttacagttcccagcggaagcgcttctgttccgtctgtcgctttatacaatgcatcaccttttaccttatacttctcctgataacggcaaactgcttttgcatctgtttgaaagacccagcttctgactggcttttccccttccttttccggatttttccctggatccagaagttctgcatagaatttcactaaaaactgtgctccctgatacgctgctgtccctgacggatcaacatactcctgttccatgcctgttttctttagcaaaagttccacaggattcatctgcggtgggtctgaaaatgtcaccagagactcctgcccggattttactgtaaccgtttttacttcatccacaagtgcataacctttaggagcttttagttcctttacgtaataagttcctgcattcagtgcaactgatgacgaatttcctgccgcatctgttctaaacgttcctgctcttgatgcacccgaaagagtaggactgctataaatgccatactctgctccctccaaagaatagcaactgttcttttctgtcacagaagtattcgctgacaccttctttaatctccctgttccggtcggctggtatgttccgccccatttactgagcggctggccatttccttcataaataaccccatatgcatccgggaaatatttataattctctttcgcccatgcaatccctttttgataatactcagatttgtgtgctgagatccaatgaccattcccacaggctacattatttcctgtttctatctggaccatatctccataccagtgatgtacttcattcatgatccaccatactgcgcattgttttaagagataatcgtaattcgaactcacaccgttgcacttattcttatcgtagtaatagaacattgccgcaatcatctgaatggtctgtttgttataacgttttgaagcatctactgctgttttgttgccctcctgaaactttaatgttggattggtgcaatacagactttctcctgatttcgtaccaagtcttccttcattccaatgttgtagcacaggccagtttgggtcattatagtcaactacatcgattgcaccgattcctctttcgattgcctttgtataaacagtttctcctgcccttgccgctgcatatacacctatgctttgtatcttcttttcatctgtctgatcaaaagtttcttccttgtcttcctcctgtttatcctccgtttcgtcgcaaaatcccacaccgatatctttcaggattttttttacttcttctgcccagcgcagttcttcttcaatatcaacctccgttttttctccgtcctcttcaggctgtttttcaagttcttcggccttgacaatgcctccatatgtcattgcatagagaatacagataaaaaagactgacatgcagaggattgttataatctctccgcgtcctttcattcattgtcctccctgtcgatacacatctctttccccagctgaagtttcccttcctgtgcataataaaaataagcatgattgcttaagatttcttcctcaggcacctgcgtttcattgatttcccgcaccattctttctaattctgactgacggatctgagaggattccggtacaatgatcacttcatggacactgcttggaagaacatagaaattttcctttaagactcctgcaagcatgtccagaatataagggtatgcaatacaggccgccccataatttttcagtttattagacaaaacatacattttatctttttccgggagttccagttcttcatgaatatgccaggttctccttaacagattctcccgatcatgttcccccggagttgatctgctgagcagttcatacactgcaaaattcattccgaaacattctgccggaagcagacgctttgtattttcttttgccacattccaaagctgttcttttgtcaccttccattgtctcatatgcagatctttgatcagcatcactgccgtcccatcattgtccgcttctacaagtactgcaaacacaagtgacagatccaaaaattctctatgtggaacatccagaagtaattccctgtttttctctgtgttgatcagtcgaaagatgattctgtcttttaccccttcgaaagaaagcattctctcataatcccatgatttttcctgtcggatttcttcatatagctccaccagatcttcaatgatccaatccatctgtttccctttttcatatagttcaaaaaattcttccagatagattgtcggcgatatattaacacccggcgtctccaggattagtcctgtacgctctgttgcattattttttttcgtcgtatagatgtttaccctgacacctccatttaactcctgagtcagtttttcctttaccgcatttacaaattctgtataattcactcttctccttcctgattgcggttcataaaattaaaatgagaaaccagtacgaaatgtactatttcaattgagttagaatttcccggagagttcagaagctctccaaatagaatttcttaaaatttagaacaaatattatgtgctctttattatagacaggccttccttaaaaagcaagccagaattttgcataaatccaaattgatttttttagtgaaaacagagaatttcatctgattttgtcaaagaaaaaaggaacctgcatgatacagattcctttttgaaatacagcttaaactgtactaaattcgtaattaaactcttgacagatactcgcctgtacgtgtatcgatcttaagaacatcacctgtctcaacaaacagcggtaccataacagtagctcctgtctcaacgattgcaggctttgtagctccctgagctgtgtcacccttgaatcccggttctgtctctgtgattgccagttctacgaacagcggcggctcaactgagaatacgttgcccttatgggaacagatcttaacgttctcattctcttttacaaatttcagagcgtctccaactacatcagcgttgagagcgatctgatcatatgtctctacatccatgaagttatacagatctccatcctgatacagatactgcatttcctttctctcgatgtgtgcattctcgaacttctctgtcgggcggaatgtcttctctactacaccaccactgatgatgtttttcagttttgttcttacgaacgctgcacctttaccaggtttaacgtgctggaattccaaaatctggaaaatatttccctcaatctcaattgttaaaccattcttaaaatctcctgctgaaaccatgtataatcctccttaattgcatttcgttcagacaatgtaactgttcgttacagactttttgcttctaccattctatactaatttgcgacttttttcaatctttttttgctcttcttatagaaatgaagcacaatcttctccaaataccgctttaaaacgatctgaatctcttcttttggattgatcggatgcactaaaatgttgtgtattccgaccctctttgcgccccatacatctgtaaaaagctgatcgccgacaaacagcgtgttcgcctgatctgttcccatgatctccatcgcatgaagataattctttcttgcaggcttcagcgcattataaatataatgcgtctggatctcctgattaaacatctctacacgttttttctgattgttggacaacagacagctttcaaagccaatctctctcagtctttgaaacagtctctttgcacgttcatctgccggtgcaccgtgaggaactaatgtattatcaatatcaaagattaccccccggtatccttgctcatatagtttttcaaaagggatcttataagtcgaccccaaatattcatctggaaaaaatttttcaaacattattttcatctaactccgtaagctttgaaatcaattcttctatgatcccaagaattgatttcattataacaattcagtgaaatgatgtctactgtttttccaacgcatcctgcacatttctcctgaattctacccatgcgtcctcatcctctacaaaatatttcggacagatttttccggttacatcatagtgacggatcacctgatctgctgtcagatcatattttgcacaaagccatgctgtaagttgtacaagtgagcggtatgttgcatcagtaaactttccattctcatccggatgacaacattcaatcgaaatcgtatccgcattgcggtcatttgaagcatatgccatctcccaggtcggaatgcactgaataatctctccttccaatcctatcacaaaattactgcttgccgaagtctcatggctatctttgagaccattaaaataatctctattatcctgcgctgtactccctggattcgctgtgtaatggacaacaatcccattcacatggtcaattgttgtccctggtctggaatacggatttatatctaacaactgtacatccatctccggctgcgtagcatccacatcagcatattgatttttcttttgtatacaggatttaaaaagaagaaaaagtaataaaatcattaatgggatcattatgatccgcagcattttcctgcctcgctttttcttccttcgtgtattcttcggcaatgttttccgccctgccagctgatttcgtcttgacgtactcattcggtatttctcctgatttttaattctctcatttccatcgtttaaaacaaacatcttcttatttcagctattataccatatgtttcttaaccatttatgaattttgtcttaactgttttatattcgtataaaagagaaattcccggcagatccagctctcactgaacctccgggaattcctcaaggcgttcctatatattattttattatatcagggatgtgatttttcatcccgtcaggtaatgcggaatatccgcagtacttccaaattatcagtctgcataaaatctgcaaacttcccaattactcgtctacactgtagttcggagcttcttttgtaatatgaatgtcatgtggatgactttctttcaatgatgccgcagagatcttcacaaatcttccgttctctttgagttcttcgattgtgtgtgttccgcaatatcccattcctgaacgaagtccacccatgagctggaataccgtatcttctacagatcccttgtaagctacacgtccttctactccttccggaacaagtttctttgcattctcctggaaataacggtctttacttccgttctccatcgctgcgatggatcccattccacgatatactttatattttcttccctggtacagttcgaatgttcccgggctttcatcacatcctgcaaagatgcttcccatcatacatacattcgcacctgctgcgattgcctttgtcatatctcctgagtacttgataccaccatctgcaatgatcggaataccatactctttagcaacttcgtaacaatccataacagctgaaacctgaggtacaccaatacctgcaacgatacgtgttgtacagatagatccaggtccgataccaactttaactgcatctacaccagcttcgatcagtgctcttgcagcctctcctgtagccacatttccagcgatcacctgaagatccgggaatgcatccttaaccatcttcactgtgcggataacattcgctgaatgaccatgtgctgagtccataacaacaacatctacgtgagatttcacaagtgcttctacacgctccagacagtttgctgtgataccaacagctgctccacagagaagtcttccctgctcatcctttgctgacaatgggtacttgatctgtttctcaatatctttaatcgtgataagtcctttcagattaccttcatcatctacgatcggaagtttctcttttcttgctttggcaagaatcttttttgcatcctctaatgtgattccttcttttgctgtaacaagtccttctgaagtcatggattctttgatcttcttagagaaatctgtttcgaacttcaggtcacggtttgtgatgattccgacaagtttacgtccctctgtaatcggcacacctgaaatacggtattttgccatcaggtcatttgcatcttcaagtgtatgctccggtgaaagaaagaaaggatctgtaataacaccattctcagaacgtttcaccttatcaacttcctctgcctgtgcttcaatagacatattcttatggatgattccgattccaccctggcgagccatagcgattgccattctatgttctgtaacagtatccattcctgcactcatcatcggaatattcaatacgattttctttgtcagatgtgttgacagatctacctgattcggaattacttctgaataagccggtacaagaagaacatcatcaaatgtaataccttcccctataatcttacccattatactttacctctctttcttaagaacccatgaaactgctttgaaatggcagttaatgtatctaaaaatcttttgtaattattaactgatatactacagaaattcccgaaggatgtcaagagtattttccctgatgtgctcataatttgtattgatttattttaacctctattattaagttttacttataagtactcctttatttattatctatgcgacaaactgagccttttttagaacaaacaaaaggttctatctgacattacgaaaatgtgatagaaccctctgttcctgctgctacagatctctatgtaacagctcttttattctattcttatagaaattctgcaaatcttcctgatggatagattacatcattcccattccacctgctccgcctgctggcatagccggtgtatcctctttaattgtagatacaacagactctgttgtaagaagtgtagaagcaacacttgttgcgttctgaagagcacttcttgtaaccttcgccggatcaaggattcccttctcaaccatatctacatatgtctcattgtaagcatcaaatcctgttcctacttcagactctcttactttgtttacaataactgctccctcaagtcctgcattctttgcgatctgagccagaggagcttccagtgctttcaggataatcttggcacctgtcttctcatctccctcaagagtctctgcgaattcttttaccttcttagaaacatggatgtatgcggatccaccaccaccgatgattccttcttcaactgctgcttttgtagcattcagagcatcttccatacgaagtttagcttctttcatctctgtctctgtagctgcacctacacggataacagcaactccgcctgcaagttttgcaagtctctcctgaagtttctctctgtcgaaatcagatgttgtctcttcgattgctttcttgatctgtccaacacgatctgcgattgcgttcttgtctccacatccgtcaacgataactgtattctctttctgaaccttaacagattttgcacgtccaagctgatccattgtagtttctttaaggtcgaatccgagttcttcagaaatcacctgtccacctgtcagaattgcgatatcctgaagcatctcttttcttctgtcaccatatccaggtgcttttactgctacaacgttgaatgttccacgcagtttattcacgatcagagttgtgagtgcctcaccctcgatatcttcagcgataataagaagtcttgctccagactgaacgatctgctcaagaaccggaagaatctcctggatattggaaatcttcttatctgtgatcagaatatatggatcatccagaactgcttccatcttctccatatctgttgccatatatgcggaaatgtatccacggtcaaactgcataccttctacaaggtcaagctctgtctgcattgtcttagactcttcgattgtgataactccgtcgttggatactttttccattgcatctgcaaccatctgtccaacttcatcatctcctgaagaaactgcagcaactcttgcgatctgctcttttccgttgactttgctgctcatctcacggattgcttctactgctttatctgtagctttcttcattccttttctcagaacgatcgggtttgctcctgcctcaaggttcttcattccttcgtgaaccattgcctgtgcaagaactgtagctgttgttgtaccatctccggcaacatcatttgtcttagctgcaacttctctgatcagctgtgcacccatgttctcaaatccatcttccagttcaatctctttcgcgattgttacaccatcatttgtaataagcggagcaccgaatgatttatcaagtactacgtttcttccttttggtcctaatgttactttaactgtatcagctaactgattcacacctctttcaagtgctgctcttgcttctgatccgtatttgatttcctttgccattttaactgcatctcctttatatttgtctgggtattactctacaattgcaagaatatcattctgctttacaatgatgtatttctctccttcaagctctacatctgttccggcatatttggaataaattactttatctccaaccttaacctgcattacaacttcttttccatccacaactccgccaggtccgactgcgattacttctgcttcctgtggtttctcttttgcctgtcccggtaatacgattccggactttgttgtctcttctgcttctaactgttttaaaacgatcttgtcacctaatggtactaatttcattgtaattcctccttactttattagcactcatttctcttgagtgctaacccatgaatataaaatagcactccccatttcatttgtcaacacagtttacatattttttataaaagaaaagccatggggctttctctgcctcacagcttttctttcgtctctaaaacttctctatgatcttctttcgttcatctcatagaatccgttctcaattttaaacttcagtagattcctgtcttccgactggtatctctctttcacaacaccggagcagcacaacagctctgtccccgttgaaatataacatctgtattttgcatccagcagaatcgttgtcagaggatcttccatcacttcaagataaatgtaatcttcttctgtatcataatgatccaccttacagactcttgttgtatcatcaaaaatagcatctgctgaaatcactttttccatctgcagatcaaccggatttccctcgtacatcttgtcttctccttctgcttacatccgctctttctcaatcctctcgagctctgtaaatacataatcattcagaactttaatataagttcctttcattcctgaagaacgtgattcaattactcctgcactttcaaacttgcgaagtgcattcacgataaccgatcttgtaattcccacacgatccgctaccttgctggcaaccaggattccctctgtaccatcaagttctttaaagatatgaatgattgcttccagctctgagaaagaaagtgtgctgattgctgcctgaacgacatgttcttttcttgtctcttccgcactttcttcattcactgaacgaagcatctcaagtcctactacagcagtaccatattcactgagaataatatcatcaatagaatacgttgcatcctgtttgtagataaacaatgttccgagacgctccccggcaatatcgatcggtgtgatgattgcctgacatccttccacagcatctgaagaaaaaccaagtgtctccagattaacattctcttttgtagacagaacactcagcaatctttcattaagcatattatcaatatgagatcctacggattctgtgatcagttcactgatttctctcaccttattgcttttgctgactccaagaatctttcccttcttgctgactaccagcacatttgagtccaaaatctctgtcagtaccgcacagatatcattaaacacaactttgctggagttattattatgcagcaacttattaatctttctggtcttatccaataattgtacgctcattgtctcctccacatgatttgctcttattcactacttctagcaaacagtaactattattttccaagttgtatacacaaatcaaatttcaaattccttactagcttatattatcatacaattcagaaaatagcaacgttgtgtttttctgttttttgaaatatttaatcttctttcttaattgtttccacatatccgcacttttcatcagcacaaactaatttatttcctttttctaccatgtatccaccacattccggacatttcttactggatggcttctgccaggacataaattcacattccggattatcctcacatccataatactttcttcccttttttgttttgcggataacaacttcttttccacacacaggacacggaactccgatcttttccagatatggttttgtatttctgcattccgggaatcccgggcatgcaaggaatttaccatgcggaccgtatttgatcaccatgttacgaccgcactcttcacagatcacatctgttacttcatcttcaatcttaacttcctcaagctctttctctgcaatttcaacagcttcctcaagatccggatagaaattacggattacttccttccacggaacctttccttcttcaaccatatcaagaagcccttccatattcgctgtaaaatgaacatctacaatacttgggaatgactgtttcataatattattaacaacttcaccaatctctgtcagataaagattcttgccttcttttgtaatatatcttcttccaaggatcagagaaatggttggagcataggtacttggacgtccgatcccaagctcttccattgtctttacaagactcgcctctgtataatgtgccggcggctgcgtaaaatgttgctttggatcaaattcttcttttgtaagaacagaattcatgctaagatgtccgaccagtacattgctctcttccttctcttcctctgcctctacatacacagagcgaaatccatcaaatgcaacccttgctgttgatacagtaaagcagtactcaccggctccgatcttgactgctgttgtctcatacttcgccggctgcatgcggcttgctgtgaagcgtttccagatcagctgatacagacggaactgatctctgcttaatgaatccttgattgctgccggtgtgcgtgtaatatctgtcgggcggatcgcctcatgcgcatcctgaatcttcttatctgcagactttgtttttgttccttctgccacatatgcttccccgtaagtctcagcaatatagcttcttgctgctgcatcagcttcctctgaaatacgtgtagaatccgtacgaagataagtaatcacaccgactgttccattccctttaatgtccacaccttcatacagctgctgtgcaatacgcattgtcttctgtgtaccaaagttcaatgccttggcagcttcctgctgcagtgtacttgtcgtaaatgggagtggtgctttacgcgtcctctcactgttcttgatatctgtaatctggaactcttcgttctctaatttctttaagatctcgtccatctcttcttttgaatggatcgtcatctttttcttctctgttccgtagaacttcgctgtcagaggacgtttctcaccttttactttcagttgtgcatccaatgaccagtactcttccggaataaatgcatcaatctctgcttccctgtctgcaacaatacgaagtgcgactgactgtacacgtccggcactcaacccacgctttacctttgcccaaagcaatggactgatcttatatccaaccatacggtcaagctctcttcttgcctgctgtgcatccacaagatccatgtcaatatcacgtggtgctttcaaagatgctttcacagcattctttgtaatctcattaaatgtaatacggcgcattttcttctcgtccagcttcaaggcagcagcaagatgccaggaaatagcctctccttcacggtcagggtcggttgcaagataaactttgtctgatttcttcgcctcttttctgagcgttgcaagaatctctccttttccacgaatggtaatatattttggttcgtaatcattctccacgtcaattcctagctgacttttcggcagatccctgacgtgtccctgtgatgctgcaactgtataattgcttcctagaaactttttaatcgtcttcacctttgcaggagactccacgattacaagataatgtgccataaaaactatactcctattttattctgatataataattctttgttatttcacgaatgtatccctgcagttccagtgtaacaagaatgctcatcaattttctgatctccacccgagattcctgcgcaatctgatccacattcttgggatacaaaccgacacaactatacaccaaatcatctgtactttcaagcacttttttatttttctcgttttttatctccgtgtttctgcacaaaacatttgtttcaatcccccattcttccagcagatttttaggattcagaaggattccggcaccctgttggatcaggtgattacacccggcactcaaaggactgtccagcggtcccggaagggcataaacatcctttccctgctccagtgccatatctgctgtaatcaaagaaccacttctcacccttgcctccattaccagaactgcatctgacagtccgctgatgatccggttcctcattggaaaattcattgcaagcggaggggttcccggtggaaattccgaaaggattccgcctccgtgttctatgatatccatatataaaccgatatgatctcttggataacagacatccactccgctccctaaaacagcataagattttccgcctgcattcaacgctgctctttgtcctgttccatcgatccctttcgccatgccactgatgatatcaacacctgctgccgccagtacttccgcaaattctcttgtataatgttctccatatccactacacccccttgctccgacaattgctgccttcttcttggctcccggacatgttcctttcacaaaaagagcaaacgggggatctggtatctcagccagccccggaggatattcttttgaaaaaaatggaataaattcgattccatgttcctgcattttgtaaaactcttcttttaattgttctttcgttttctctttccgggctttttttaatccctctttttcttcctctgtaaggaattcaattcctgtaatttcagtttcttctatataatatatcttctttccacttcctatgagttctcggagcagatacttttttcttgcagatagttttcgaatcgtagaaaaccagtattcaaaaatcatctcttcacacatcatacatacctcccccaatatttcctgtccaatgtccggtaaccgatcgcctcctgtaaatgttccagttttatctcctcactgtaatctaaatccgcaatcgttctcgcaacctttaagattcggtgataagatctcgccgtcagattcagtacatcataagcctgccccatcagtcgcatttcttctccgtttaatctgcaatacttactcaattctgcaccatgaagcattgcattacactggatcttcgtgttttggtagcgaatcttctgtctctttcttgcttcacatacccgcgctttaatcaccgccgaagactccggacaggaaacagactctttcaccaaatcccgatattccactttagaagcttcaacactaaggtcaatccgatcgagaaacggttggctgatcttgcttaaatacgcctggatctgtgccggcgtacaagtacaggctgtcgatggaaatttcccacacggacacgtattcatggcagacacaagcataaaatcggccggaaagatataattcccgctggttcttgtgatctgtatgctgcgttgttccaatggctgcctgagcacttcaagaacacttctcttaaattcaggaagttcatccaaaaataaaataccactatgcgccaggctgatctctcctggtcttggaacaatcccaccaccaatcagcgctgctctcgttgcagtatgatgtacctctcgaaaaggtcttctggaaatcagtggttcccttccatccagcattcccatgacactataaagctttgtaagctccatactttcttcataattcatcggcggcagaattcctgccatacattttgcggtcattgtcttcccgcttccgggtggtccgaccataagcagattatgccctcccgccacagcaatttccgctgcccgacgaacattctcctgaccatataagtctgcgaaatcaggtacttcttctcccacttttcctctgtcttctattttatcagcctctttttcaccaagatatctctgttctccacctgttctgtctccatctttcaaataactgatacattccctgagacttccaactgcaatgatccgaaccccttctacaagttctgcttccttttcattttctctcggaacaatacagcttgtaactttttgtacctttgcctctgataccatagaaagaatcccgggaacttttctgacttgtccatccaatcccagttctccgatgatcatacagtctttcattcttctattctgttgtaaaacgccaagtgacgtcagaatcgacactgcgattggaagatcaaatgacgctcctcttttcctcatagttgccggcgaaagattgatcaccacacgtttcgccggaaattcaagacctgaattccggactgcagaccgtacgcgttctgctgcttctttcacctctgatgacagatatcccaccatgtgaaaaatcggaagtccattgctgacatccgcctccacatagaccatttctaccgcaagcccttccattgccgcggattttactgtactaaaactcatatgcgctccttccttttcccagtcacaagcgcacctgttcttcttacaccccattgtaagctgctgaaattctggctgaatcagccggatttgattttcggaactgacattccgagaatgtatagatatcataacttccgaatatcgatttgtcaatcagtttccgagaacttgagcatatggaaaagcacaatttccacattttttcataaactatattaaatgcatccagaggtgctgtcttgaaagcatttcctaatcccctcacaccggcggaagagaaaaaatacattcagagatacaccgagggcgatctggaagccaagcatattttaattgaacgcaatctccgtctcgttgcccatgttatacggaaataccaaaataccagtgaagatccggaagatctgatttccatcggcacgattggcctgatcaaagctataattacgttcgatcctgaaaaaggaaatcgtctggctgcctatgcctcccgttgtgtagaaaatgaagtcctgatgtatctgcgcgccagaaaaaaatgcagccatgaaatctctctttatgaaccgattggcacagatcgggaaggaaatgaagtcaacctctacgatatcatcgaatctacagaaacagatattccagagcggattcatctgaaggacaatattcaaaagctttatgaaaaactggaaaatgaactttctccaagagaaaaacttgtattgaaaatgcgatacggactgtatcagggagaagaatacacgcagcgggagattgccgcacaactgggcatctcccgctcctatgtatcccgtatcgaaaaaagtgctatcggaaaactccgacaatatttttgaactttctaagactcttctatgaattaacttctttatcctcttcctgtcttctgagaagatcgtactgagctggtgtctcgctcagttctacatgaagaacctgctttgaatgcggtgcactttcctgttcctctccatcctcattcaggatccggagaacctttgcctcaacattacttccgtccggcttcatgatctcaattgtctcacctacagaaaacttattgcgctgttcaattcttgcaagcccattctcaacagccccgacaattccaagataagtatactctcggatatatgtgttattgtcataaatctgtgtctcatgatctggttttccaaagaaaaatccagtcgtaaactgacgataagtacagtttgaaatctgatccagataccaaggcatgttcttcttgtaaagctctggatctttctgataatcatcaattgctttacggtaagttctcgccactgttgcaacataaagtgctgttttcattcgtccttcgatcttaaaactgtcaattcccgcatcaattaattccggaatatgctcgatcatacaaagatcttttgaattaaagatgtaagttccgcgttcattctcatagaccggcagatattctcccggtctcttttcctcgactactgcatacttccaacggcatgggtgtgtacatgcaccctggtttgcgtcccttcctgtaaaataattactcagaaggcagcgtccggaataagagatacacattgctccatggacaaatgtctcaatttcaagatcttccggaattctttctctgatctccttaatctctttcagagacaattctcttgctgaaaccacacgacttgcaccctggcgataccaaaagttataagttgcatagtttgtgttattcgcctgtgtactgatatgacgctcaatctcaggacatacctcttttgcaatctcaaacacccccggatctgcaatgatcagtgcatcaggtttaatctctctcaactcttcaaaatattctcttaccccttcaagatcatcgttgtgggcaagaatatttgctgtaacatacacttttacatcatgtgcatgtgcgaattctattccctctttcatttcttccatagagaaattttttgctttcgcacgcaacccaaatgcttctcctccgatatatactgcatcagcaccgaaaattacagctgtttttaacacttccaggctgctcgccgggatcaatagttcgatcggtctactcatttttctactccttgttttatgctcactgccacaccatctccaagcggaataatagatgtgaccagatcctctctgtgtttcaattcatacagatattctcgcattctcgcatgtattgtacgatttctgcgttctaccgcaaaacgggattctatgatatccccatcctgcatcacattgtctgacacaagacagcctccatccgaaagcaatcgcaatacattcggaagataatgaatatattgccctttcgcggcatccataaagataaaatcaaaagttccttccatttccgcaagtacttctgtcgcatctccttcaatcagagtaatcttatcttcctttcccgctctgcggaaattctccctcgcaatcgggattctcttctcataattctctattgttgttatatgtccaccttccggcaggtaatcactcatcaataacgcagagaaacctacggcagttccgacttccagaacgcgcataggttttttcatcaaaaggagaacctccaggaagctctgcatctctcgtcggatgatcggtacatccgccgccagagcttcctgttcaattgtctccagtatttcactgttctctgtatccatagaattgatgaatgtaataatacgctcatccactatcatatcttacacatccacatccatgatgatcgggatcaccattggtcttctctttgtcttcttccagatatagtcattcattgcatcacggatcacaagcttgatcttattccagtctgtatgtcttcctttcaggcatttctcaagtgcttctgaaacagcctttcttgcatcatccatcagctcctctgactctctgacatagacaaatcctcttgatacgatatccggtcctgcaagcaggcggttcgttcttctctctaatgtaagaaccacaataatgataccatcttctgcaagatgctgtctgtctcgaagaacgatatttccaacatctccaacaccaagtccgtctaccagaattgctcctgtatgaaccttatctacaaccttagcgtaatcatcacacaattcaagtacttcaccggactgcataataaatacattttccttcggaattccaaggctcttcgcaacacctgcgtttgctttcagatgacggtattcaccatgcaccggaatcgcatatttcggttttacgagagaatagatcaacttcaattcttcctgacaggcatgtcctgatacatgggcatcctggaaaataacttcagctccctttgcagagagttcattgattacacgtgaaaccgatttctcatttccaggaatcgggttggagctgaaaatgatcgtatcattcggctgaattgtaaccttgcggtgtacgtcagctgccattcttgacagtgccgccatagattctccctggcttcctgttgtgatcagcaccatcttctccggtggataattcttcatctgatcaatctcaatcaatgtattatccggtacattcagatatcctaattctgatgctgtagaaatgatattcaccatactacgaccttctacaacaacctttctgccatacttataagcggagttgatgatctgctgtacacggtcaacattcgaagcaaatgtcgcaatgatcagtcttgtattctgatgctctgcaaaaatgtgatcaaatgtgatacctactgtacgttctgactgcgtaaatccttttcgctctgcattcgtactgtcagacatcagtgccagcacgcctttcttaccgatctcagcaaaacgctgcaggtcgatcgcatctccaaataccggagtataatcaaccttgaagtctcctgtgtggacaacaacacctgccggtgaatagattgccagtgcggacgcatcctggatactgtggttcgtcttgataaattcaatccggaactttccaagattgattgactgaccatgacgtacaacctttctcttcgttccacgaagcagattatgctccttcagcttgttctcaatgattcccattgtaagcttggttgtataaatcggaatgttgatctctttgagtacatacggcaatgcaccgatatggtcctcatgaccgtgcgtgataacaaatccctttaccttggaaatattatctttcaggtaggttacatccggaattacaaggtcgattccaagcatatcatcttccgggaacgcaagaccacagtctacaacaacaatactgtcttcatactcaaacgcagtaatgttcataccaatctgttccagacctccaagcggtatgatacgcaattttccattattctgttttttcaaaaaatatacacctccactatctctgtttcttcatacagtctttacacagtccgtagaatttcagttcgtggtccaggacatggaagccggttgccttctcgatatgatcttccagactctccagaaggtcatcatcaaacggcatcaccttgttacatctcttacaaatcaggtgatgatgattatgctttgtctccccgttcagtaaatgtccgatctcatagcgcacacatccatccccaaaattaatcctgtctaccagctgcatatcccacaaaagctgtaatgttctgtatactgtggcaagcccaatctccggataatcctctgataccagatcatagatatcttccgctgtcatatgactcccactgttctcttcaagtacggacagaacaagcagtctctggtgagtcaccttcagccccttttcctttaacttctctttcagaagcttctgtgtcttatctgcttccatctgtctgcctcctatctatattgtaaaaagaactccagacttttttctgacacttctgcaaaagtgagaaaagtattcctgtctgcagtttctcttacattcgtatttctttcatgtaattacatctcaatatcgacgtcttccagcaattcctcaaatactttggaaactgccatcagctctgtatcgtcttccacgatctcatacgtcttctctgcgtcttttgattcttcaacttctctgagaatcaggcattctgcgtcatcttcttctgaatcaactacaagaatatacgcggaaccattgatctttgtctcttcaagtacaaagaactcatctgctccacttccatcactgaaagtaaactttgccttttccatatgattttcctctattctgctgttttctgcatataaatcgaatctaaatatccctggagaatgaacacagcagcaatcttatcgacatattgctttctgttttctcttctcacaccactctcgatcagtgtctgctctgccgctactgtcgtaagtctctcgtcccacatgatcacttccagtcctgtacgacgaaccagcatgtcacgaaattccaatgacttctgtgcacgctccccgatatcattattcatatgttttggaaatccaagcacgatcttctctacctgatattctttgatcaattcttcaatcctagcacaggtacggcgcagcttgttctcctctttccgttgtattgtctcaattccctgggccgtaagtccgagcgggtcgctgatagcaacacctacagtcttcgtcccatagtccagtcccattactctcattgtctgattattcccacgcattatgctcaatatacgctttcaacagttcttctaccagttcatcacgttccaccttcatgatcaggcttcttgctccgttaaaacttgtaatgtatgtcggatctcctgacatgatatatccaacgatctgattcaccggattgtatcctttttctttcagagccttgtatacgatctcaaaaatatccttcgcagaaatctgcggacccggctctacctgaaagaactgagtactacttaaatcactcatctttcttcctccttctctttcttgtatctatttccttcttccgaagggctttgctgttgttctgtcaaacagcgcaaaacgctctggaaacccagaaaccctacttataattctaatataaccgaattcaaaattcaatgtataatttgcgaatccttcccaatttgaacttttacgatactattcttgagattttcatttgtctctagtgcaattttcatatattctttcgtatgacctatctgtacttcttttccattcagttccagatcctcttccacaagtacttccacttcttttccctggaaactctgttcatatgctgcacgctttttctcaccaagttcaattaattgtgcacttctcttctccttgatctgttcatctacctgatctggcatcacagctgcttttgtcccctcacggcgggagtatttaaaaatatgtgtctcatagaaatctatgctgtctacaaaatcatatgactctttgaactcttcttctgtctctcctgggaatcccacaatcacatcggttgtcaatgccggattcgggaagtattttctgagaagttcacatttttccgcatattcactgcttgtatatctacggttcatacgctttaatgttgcatcacatccgctctgcagagacaggtggaaatgcggacacatcttcggaagctttgcaatcccttctgcaaatttttctgtgatgatccccggttccaaagagccaagacggattctttcaattccatcaatctcatggactgcccggatcaattccagaaggtgatattctttatcaaaatcaattccatatgagctcagatgaattcctgtcagtacaacctccttatatccgttatctgccagtgtacgtacttcatcaagcacatcttccatggaacggctgcggactcttccacgagcatatggaatgatacaatatgtgcagaactgattacatccatcctgaactttaatataagctcttgtatgatctcccggcttcgtcaggtgaagattctcgtactcttttgtctttccgatctcttccatcttgatctctgcttttctgtcgttttcctggttctttgcattcttttcattttctgttacgttgcaatctgcattgtgtgttctttcatactcttccaatgcttcgatcagattctgcttcttattattaccaagcacaatgtcaatgcaatcatccacctgaatctctttttccttcgcctggacataacatcctgcagcgacaacaactgcatccggattcatttttctcgcccggtgcagcatctgtctcgacttgcggtccgcgatatttgtaacagtacatgtattgattacataaaggtctgccccttccttgaaaggaacgatctcataccctgctttttcaagcatttcctgcatggcttccgtctcataggcatttactttgcatcccaaattgtgcagtgctgctttcttcatttatttctacctcttttttccttttatctcgttaatttcttgacttttgaacctgcatcccgtagaatatacctaggcttaggagccaactttattgtataattcaaggagggatttcaaatgaaaacagtacagatttcattaaactcaatcgacaaagtcaaatcattcgttaacactatcacaaaatatgataatgatttcgatttagtatccggaagatatgttatagatgccaaatcaatcatgggtattttcagccttgatctttccaaaccgatcgacctgaacatccacgccgacagcaatattgatgatattcttgctgcacttgatgcttacatcatcaaataattctatctgaatacaactcatgcggactttgtttttgtagcttgtctgcatattttttagagtaaagaaaagctgttccattggagcagcttttcattttcctattattctccctgcttcacttcaatgatctcaacagtatcaattgctgtctgcatcagttcgtcaatcttttctgcaaggttcaactcagacttctcaattcgttcaatattcggctttgtcaccggatgttttgcaacgaaaattgtacaacaatcctcaaatggctggattgaagtttcataggtattgatcttctcagaaatttctacaatatccttcttatcaaatccgatcagcggacgataaaccggaagtgtacatactgcattcgtcgctgcaagactctgcattgtctggcttgctacctgaccgatactctctcctgtgatcagaccaagacatccgtctttctttgcaaaatgttctgcgatcttcatcatgtagcgacgcataatgatcgtcagttcatcatgtggacacttctcatagatataaagctgaatatctgtaaagttgacaacatgaagcttgatcggtcctgaataagcagaaacgagtcttgcaagatcaactaccttctcttttgctctttcacttgtgtacggtggtgcatggaaataagttgcctcgagttcaacaccacgcttggataccatatatccggcaaccggactgtcaattcctcctgacagaagcagcattgcgcttccgtttgtcccgattggcatacctcccggtcccggaatgattctggaatagatataaacttcttcacggatctccacattgatacgaagttccggcttatgaacatctactttcatttccggaaatgcctccaggattgcttctccaacttcacagttgatctccatagagttcgcaggatagctcttctttgctcttcttgcatcaactttaaatgtcatgttcttctcttcgtaagcttcatctacataagctacaacatcttttctcagctgttccaactctgccaccggtacacggactaccggacagattccaacaataccgaataccttctgaaggctttctactgtctcatcaaaatcataatctccatcacaatccacgtagactcttccgtgacatttgtgtacaaggaattctccgtctacgccctgcagagcataacgaatctgacgtaccagtgcatcttcaaagatataacggttctttcccttaattccgatctcgccgtattttatcagaaatgaatgaaatttcatgctttttctcctttatgaatcgacgtcaattaatgacgcgtatattttctcagcatcggtatacaattatatagtgtttccagcgtgtagtcaatttcttcttttgtagtaaattctgacatactgaaacgaatcgtcgcatccagatattcctgtgccgccccaatgcttctgagaacaccgcttactgccggatgattcgatgcacatgcagatcctgatgagacataaatccccttatcttccagtgtatgaagaagaacctcacttcggattcctgcaattccaagactgatgatatgtggtgcacttccttcatctttcagaccatggactgttgtattctcaatctttcctgcctgctcaataaaataatccttcagttcacgcatcagagctactttcatatccagatcattatagatcatctttgttgcaagtccaagccctgcaattcccggaacattttctgtacccgaacggagatccttctgttgtcctcctccgaaaagaatcggtttaatcttcaccttttcacccacataaaggaatccggttcccttcggtccatgaatcttatgtccactcgcacttaacaggtcgatcttctgacgttttggataaatgtgatattttccaaatccctgcactgcatccgaatggaaaagaatagaagaattatactcttttacaatctttaccgcttcatcaatcggttgaagtgttccaacctcattgttcacatacataactgatacgagaatcgtctccggacaaagtgcttctttcaatgcttccagattcactcttccactcgcatctaccggaagatatgtcacacggaacccttcctcttcttccagataacgcattgtatttaagattgcaggatgctcgattgaagttgtgatcaggtgatttcccgctcttctgtttgctcttgcacatccgatcagtgcaagattatcactctctgttcctcctgatgtaaagtaaatatctttcgcatttaccttaagaacctttgcgatcgtttccttggcttcctttacataatgctccgcatctacaccttttcggtgcatggaggatggattgccataatcctgacacattactttatatacaagatctcccacttccggatatgctctggttgtggctgaattatccaaatatgcttccattttatcttcccttttctaactctgttaccattcacaggcgtctgcaaccggcaacgtctttctattatcttatgtttttatcgtccaactgttcccggcattctaaatgatacatcagaattgacaatgttgtaagtcctgctgtctctgttcttaaaatacgttttccaagtgtgattgggatcgctccggcctctttcgcctgctcgatttcgctctcgtcaaacccgccttctggtccgataaagataccgacagactgttccggttcaatcttacttatgacagcttctgttgctttcatcccttcctgcagttcataaggaacaagcactacatccagctctttcgcgtaattcatcgcttcctgaaagctcatcacatcctgcacttgtggcacaattcctctcttcgactgttccgcagcccccttggcgattgcctgccagcgttctctcttctttccggctttcttctgatctagctttacaaccgaacgctttgccgcaaacggaacaatacgataagctccaagctctactgccttctgcacgatccattccatcttatcccctttcggaagtccctggaataagatcagacgggaagccagttctgtctgagacacttcttttttcacaacgcgaaggactgcctccttctcctcataaccttccacactgcagaagtaatccattccttctccatcactgacccacacttcttctccgggtttcattcggagtacattcttcatatgattcacatcacttcctgccagacggatctgttctccgtccacacaggatggatctgcaaaaaaatgctgcatcttgtttctccttatgcgttcttacgcgctgtcacacatacccattcgccctgatatgtaacatccagaagttccagtccggctttcgcaacagcttctttcaccatctcttctttatcatcgataattccacttgtgatatagattccgcctggtttcagctggttcacgatcactggtgtgagttctacaagaaccggtgcaaggatattcgctgccacaatatcgtagcactcatatccaaccttatcctgaacttctttgtcattgataatatttccgatcattacttcatatttatctttggaaattccgttgttctccatgttctcataagttgcatcgattgcacacggatccagatctgttccaacagaatactctgctccgaacttcagcgcaagcattccaagaattccgcttccgcatcccacgtcaagaatctttgtcgtctctgttgtatactttctgatctgacggatacaaagttgtgttgtctcatgcattcctgtaccaaatgctgtacctggatcaatatggatcaccatcttatcttcatctgaaggcttcacatcttcccaggatggaataatcagaatatcatccacatagaactgatgaaaatacttcttccagttattcacccagtctacatcctctgtctgggattcttcaatctcgcaggctccgacatttacataagcagacatctcctccagttctttcttcacatttgccagaactttttctttgtcctcatcctcttccagataaaaacttaagtaagccacaccatcatcagcctcgatctccggtaaaatatcaacaaacatctgctctttatcagactctgtcagcgggatcttatcctcgatctcaacaccttcaatcccaagatctgccagcatactgcttacaatatcctctgcctctgttgttgtcttcaatctgaatttattccatttcatctagttttcctcctgaaaccacaaatctaaatctacgcttgcacgaattcccggaaccgtaccggcctcactgtactgccacatcttataatcatatggacactgcggaagttcatgataatccgcataccagaaatcatattctgtcagctcttccatcttcaaggtaaatgccatccatttcatattagcataaatcatcggttgatatccagcctgtttcactccgtcacaaaagactttacaaaaattcgtaaagtcttcccttgtattctggtctgttcttgctgtatcatctttgatttcttctgtgtcatagacaacaggtcctgtaatctgatacggctggatatgttccaaaacaaagtcagtctcttcgactgcctccgttgctgagattgcctgggaaaagaaatagacaccgacttccagaccggcatccaatgcgccttgtacattctgttcaaacatggcatcttcaactaacgcaccgctctctccatatgcacggtatccaagtcttacgatcacgaattcgattccgctttccttcacctgctgccagtcgatcgtctctccctggaactccgaaacatcaattccttttttcgctgacacttttcccttcgtatctttatacgaaagatatcctgtctcttcatctaatgccagattgctaaaatcataagaattcctcggtacttgttccagaagccttgctctataattattctctttcacatcctggaagtcatagtacttctttccgtcttctgtaacaatctgaactccactgacaatctgcgtgttttcctgcttgtctttcttcgtctgtcttgtcttcacgttgccggaacccacgccgacaagaataactgcaagccccacaagagccgccgccacccattgcttctttctcatctatttccttccaatcgcatctgttccgtaccgttgcagaaatgtttcccaggtaattttttccttattcgtctgctgcaagcacgatcatttcatctccggcttttattttaccaccatgaagcacttttgcaaataccccttctcgcggcatgatacattctcccattttctggaagatctgacaaccatgatgacattcttttccaatctgtgtcatctctaataaaacatcgttacattttaatcttgttccaactggaagattacggaaatcaatcccctgaacgatcacattttctccaaatgcgccatcttctacttctgcacctcttgcacggaatgcctcgatcttgtcataagaaagaagactgatctgacgatgccattttcctgcatgtgcatctccttccagaccaaaatcttcgataaatgtgccttcctcgattcttgtcttctgtgttccctttgccggacttgtacaaattgctattacttttcccatttttctatacctctcaaattactttttcacttttataatttttgtgcataatctgcactgttacttttctgttactgattttatgttactgttcacacgatgtgtgaccagcaacgcatctcgccattttaaatcgcctttggcgatagggcgagatgcattcaagtcaaaacacgcatcctccgtgtcaatcagcggagtgattgacacgggagtgaacagtaacgattttatttcattactgatctaaccaccgattccgtacatggcccgatgttcttttttctgaccaacttcttcatctcttcgctcatccgagaaattgtgacaggccggttttttccagattgcctgacgcattgcttctttcacttcttcatccgttgcaccacttcttaaaagttttcttaaatcaattccactttcatactgtagacagagtttcagatatccttccgctgtgagccggatccggttgcaggaatcgcaaaacttgtgactcactgcactaataaatccaattcttccctggaatcccgaaaagctcacatactctgccggaccattccccaaatgtttttcatacggttcagcgtttccaaatgctttctctaaaagttccagaagctcatctcttgattttccctgacaggcttttcccatcccgatcggcatcatttctataaaacgaacctctaacggatgctcctttgcatactctgccatctgaatatactcttcttctgactgattcatcggcacacaatttaacttcacacgcagattcggatattcgagtgctgcctgcagtccttccagtgcctgatttaattccccacatcttgtcactgtatggtaacacgtttcatccaatgtatcaatactgatattcactgcatccagcccctgacgcatcaactcatccaactgatttttcagaaggattccgtttgttgtcaatgtcacctgttcgatccccgaaattctcttaattttccccaataagtccggcaatccttttctcaccaacggttccccaccggtcagtttaatctttgaaatcccaagttctgtactgatccggcatactctctcaatctcatcaaaagtcagaatctgctcatgcggcagctgctcaatgccctcttccggcatgcagtagacacagcgcagattacaacgatccgtcacagagatacgcagatattctattgttcttccatattgatcgatcatctcttacatacctcatattatttatctcttacattactgttttactttccttcaggaactggttttccacactcacttgcatttcctgtaagaattgcaagaccatgttccaaagatggaagtactgcttctagattctcttttacggccttcggacttcccggaaaattaatgatcaatgtctgattacggatcacagaagcgccacggctaagcatagctcttggtgttacctgaagtgaagccagtctcatcgcctctgcaattccaggtgcattctttgtcgccacggcaagtgtcgcttccggtgtgcagtcacgcggtgcaaaacctgttcctccggttgttgcgatcagatccacttttttctcatctgcaagttcgcagaggcactgttcgatcatcttctgctcgtccggaagaagccttacttctgttacttcatatcctgcctcttctaacataccgcaaagaagcggtccactcttgtcctcccgctctcctgcatatcctttatcactcagtgtcactaccgctgctttccatctttgttctttcttttccactttacttttcgccttcttttctttccttcttatatccattgttgatcagcccactcttgccaccgctctttctgaccagatagatttccccaatctccatctttttatccatcgctttgcacatatcgtaaactgtcaaaagtgctacgcttgctcctgtcagagcttccatctcaacgcctgtcttcccggtcacacgtaccgtacaattacaataaattgcaagttcactctcaaccatctcgaactctaccttacactttgtgatcggaagaatgtgacacatcggaatcagatccgatgtcctctttgctcccataatccctgctgttgtcgcaactccaagcacatcccctttgcctgcagttccttctttgacagcacggaacacttcttcattcaccgtgatctttcctgtggcggttgcttcccggactgtgtcctgcttctccgtcacatccaccataatggcttttcctttttcatcaaaatgtgtaaatcccatttttttcacctctcaatctgaaaatgctgttgatatccacattccccttgcaaatatcaaccagacgattgctttttttataccaaacgattgtaccacagaatagtactaaaattcaatgttttggcaaaaagaaaggacaactataatagctgcccttttaccatcatcccatctttttctttaattcttgtatcgtttccagagtttctttcgtgatttccgcaatctgttccagtggtagtcccgcttcaatcattgataaaataatttctttacgtccacgattttctcccgtcttgatcaatatatcacgatctctgattgctttctgtcttgcttcatattcaagacgttttttctcgtccgcacttaatttgtccaattctttatacgcttcttcaaaacaagaattcttcttagccattttctcaaaatcctccctgcgtttaccattcaaaaagcgcatccactgcattaaatctgtttcactcttttgttccggcggtaatttgggcagttccaaaatatgcatttccatcagatctgtatattccttccccgtctttacatcacaaaacgaaatacgtcgataacactcatcatcttcttgaaataatacatgagcaagaatacttacttgaatacatttctgtaatctatcatagctatcaccttctcgtatctgttccgtatacatcttactcaaataataaattgtacgattcgcccaaaaatcataataaaccacctgcatttcaaaatcaatctgtacttcattatctaactgcacccgaacatctagaattccatacttatcatcttccgaatcctttcttaggattgtggggagaagctcagtatttacaatttcatctggacgcctgtttaatatagctgcaataattccttttctcacattttcattttgcatcaactctttaaagcaaaaatcaactgttggcaacataatgaaatcttctttttcatttaatgcattttcgcttttaattgcacttttagatacttttcttgggttttctttcataagaattctccttttcgtttttgtaagacaaacacttatatgaaggaaagaattctttatccaaatttattgtaacataggtttttttttcagaaaagcagaacttttaaacctgatcctttaataaactttcagttatcattcatacaatattcgtcttatgttttgttatcggattatttgttcgaatactgaactatggaaataattaccgattggttaatagatatctttgctgttcataagaataagaactgcgtgaatttaggctaacatatatttccgaaaattacaacctctttttgattttccgtttaatagaaataaggacaactataatagttgcccttaaaatcaattattaaaattcaatattcagcatctcatctgacttctccggaatcttatgtctttccgcatatcctgtaagaatcaacgtaagtgctccgtccccggtcacattacaagctgttccaaaactatcctgaagtgcgaaaattgtaagcatcagtgctgttcccgcatcatcaaacagaaggactcctgtgataagtccaagggatgccataactgttcctcccggaactcccggtgcaccgattgcaaatactccaagaagtatacaaaacagaagcattgttggaattgacggaagttttccatacagaatctgtgagattgtcatacagaagaacacttctgtgagtacagatccacacagatggatattagcaaataacggaattccaaactgtaccatatcttttcttaatggtttcgcctttcctgcacactgcagagcaactccaagtgttgctgcggaagacattgttccaacggctgtcagatatgccggtccgtaatgcttcacaacctccagtggattctttcctgaataaacgccggcgattgtataaagaagtgccatccagatataatgtccgatcataacaataataataaccttaaggaataccggaagctgttttgtaatggatccttcatacgccagagaacaaaatgtgaatccaataaataacggaaggattggaatcaaaatccttgacacgatggaaagcacgatcttctggaattcttccaacattcctgtgattaattttgccttattccatgccgctgcaagtccgatcataatagaaaatacaagtgcactcataaccggcatgatctgtgggatagaaagttcaaacaccatctccggcagttctttcagtccatctacatctgtcacaatagaaagatgcgggatcagcgcatatcctgccgctgtagagaataacgcagccccaacagaggatacatatgcaatacatactgcaagtagaagtaatctcgatgcattatttcccatctttgtaatggacggtgcgataaatccaatgatgatcagcggaacgcagaatgaaataatctgtcccagaacatatttcaaagttacaataatgttcagaattgcatttgtcaaacctgtcccgtcatttgcattaagagcaagtccggcaagaattccgatcacaacacctaccagaagtttaaatggcagacttttgaaaaaactcgattttttcataaaaagaatcctccaatactatttttcggtcctaattcacagatgtctgtaatctccaacctttctcagacctgtttagtcggtatgcaatattataatacacgaaggataaatctacaactgtctgtttttggcactttttatcttctcatcacatcgtccgcttacgaactcacctttattctttacttttttataattcatgataaaatatttctaatactatatcgtgtttaaaaggagattttaaaatgttagtatgtgattatatcgtagaacaaatcgacggagattatgcacacttaagaagagttgatcttccggatgaagagttaaaactcgtagccagagcactgctcccggccgagattgtagaaggttgtaaactgcactatgaactgatgcagtatacaatcatctaatgttactattcttctacctgtttttattcaaagaagactgtaaagaggattccctcctgaaaatatttcattttaaataaagggaaatattttcaggcaggaatcctctttgtacgttttctctatttcattccccgtcaattaatcttcatcaaacggaacaacatcatcctctgctttttccacagcttcaccagaaccacctgctttcggtcctgcaacgccttttaccttcatcgttctgacattgatcccattgacctcaatgtggtcatccacaggaatcacaaggcactgtcttccgtcgatcattcttgtctctacaagatccattctgtccggatttactttgatcacaacatccggtgtctcgatattgaactttcttgtctctgcgatattacttgccagaagcgttgctttctcacctgcattttcttcgaagttcttctcaaagttctccatcttctcattcggcacaccgctctgctcgaaaatcttcttcacgtccgttttatccaatgtcagcggatccggttcttctttgtgttcttcgatcatatcatttaatgtctcgtgaatgttacggacagtctcgtaatcaccatcttctcccaatgtatcttcaataatcatctggaatgtctctttctgtgtgtccgcagacatcggcatcttcgcaccaagaagctggtcgatcatctccggctgaagatcttctgatttcttcgtgtaataaagcacactgtgaagatcagtacttctgtcgttgaatgccgggaagaggaatcctttgtccggcttatcaacgatccagtcacggattctgtcctgaatacagttctcttccgcgttatagctaagccctgcctttgacagactgaccggacagatgctcatcaggatatgctgatatacttcatctgaagcatcatccatctcaagatcatcggatgttcttccaggaacatcgtatgctgcatggatcaaaataatgtaataattctccgcatactcatacgttgcaataactttgtcatagaattcttccagaagcatatcgtcttcgagacggctgtcacgaagcttcagaagaaattcctgtgttccgcccggcatctctgcatccagtggaaactccatattcagcatattctttccgatacttccggaaagcgtcttcttaaaaatatcaaaatacttaaatgcttcttcctccggaagtgcgagaaatgcgtcttttgactccatctttttattcttctcataatccacatagcagccacagattttcgtaatcgcacagtttttcggtgagaactgcttacggatctcaagtacttcttttttattcatatatgtttcctttcttcgttctatgttataatgagtaaaaccatcttttcggggattgtaaataccgtagacataacatttttattttacctctattttcataagaaagaaagatttgattttctcaaaattctatggtattatacgcattctgaaaatacagaaaggaattttttattatgtcatccaactcagttactttaactgcccgggaacatgtatttccactctttgttaaatatgtctcagcaaatgtactcggcatgatcggatattcttgttatatccttgccgatacattttttgttgcccggggaatcggctcggatgcgattgctgcacttaatctggttcttcctgctttcagcttgttaaacggaacagggctgatgatcggtatgggtgctgctgcgcgatactcgctttcctccggcagagctgacagtgagattcaccgcacgatcttcacccaggcacttcagcttgcatttgtagctatgctgttctttttcagcatcggactgttttttgcaagacctctttgtgtcttactcggagccgacggaactacattaccgcatgcaattccatatatcagcatcctgctcatgttttctccgctgtttttgtgcaacaatctgttgaactgttttgtcagaaatgatggagaaccgcgactttcaatgactgcaatgcttgttggaagtctgacaaatattgtgctggattacattttcatctatcctatgcagcttggcatgaccggagctgcactggctactgcaaccgctccactggttggaatgagtattctgtccatgcatttctggaaaaagaagaatcagtttcatctggtaaaaacagggatacatctgaaaactgctatagatatctgccggcttggagtttcttctcttgtcgctgaattatcttccggcatcgtaattcttgtctttaacatgctgacgctgaagttcagcggaacgaccggacttgcggcatacagtatccttgctaatatcgcactcgtacttgtggcgatctttaccggaatcgggcagggcatccagccgattgtcagcagccaccctggtaaaaatggagctcctgtacgccaccaggtaagacgttatgcattaagcactgcattacttatggctttcatcgcctatctggttgtgtttgtctttgctgttccgattgctgacttatttaataaagacaagaatccgctgcttacttcaatggcagcagaaggaatgcgcatttactttgtaagcctgttcttttcaggcatcaatatggtgtcagcgacttatttaagtgcttctgatcagccggtaccgggattcatcatctctatcttgcgtggccttgtactgatcttgccgattgctttcctgcttgccgcattttttggaatgacaggtatctggctctgtctgcctgttaccgaagcaatcgtgtgtatcgtgacttttttctttctgagaaaattttaagcaaggtatttataaaagaagaactctgttacgaatgtattgattcatacatctcataacagagttctttttttaccttattttaaatatttcgctgtctcaagaatacggtttgcattctcaattctctcctgtgtcggaggatcgattccctctaacttgtaatcatatccaagttctttccacttatatgcaccaagtgtatgatatggaagaacttcaacacgctctacattatccagtgtctcgatgaaatcatgaagtctctccaggtactcatccttgtcactgcgctccggaacgagtacgtgacggatccagattggtttcttgatatcagacagataacgtgcaaactcaagaatattcttgttgctctgtcccgtgagaatcttatgctgctcattatcaatgtgtttgatgtcaagcatcagcatatctgtgtatttcagcagttcctgcagtttaccaaagaatggttcttcctttgtaaatacagctccgcttgtatcaatattggtatgaactccctgttctttcgctttcttgaaaaggtcaatcaggaaatccatctgcatcagtggctctccaccgctgactgtgataccacctttatctttccagtagcttttatagcgaagtgctgtcttaagcagttcatctgttgtcttcagttcgccgtcctgcatcttccatgtgtccgggttgtggcagaactggcagcgcattggacatccgcttacaaaaatgataaagcgtacgccaggtccgtcaacggaaccgaagctttctgttgagtgaatgtatccttttacttctgacatatatttctccttctttttccggcagtttcctgccattcttctgcaaccttcagatttgtcttctggcatttctttataattgcaggtcttgtgaaaaaaggacgcagcatggtgaaatgactgcgtcctgatatagtttctgcttatttatgcatttctatacgccattgctctcccagctcgaatccgctccgcttcttctcgctgtagggctgcgccctatgaagccagccagtaaagagtctctttgtaagcaagcttacacgatccttttactgtctgtcttcgcatggcctggctgaattacaaattacatgtggtcatggcaagttcttgcgataacgtcaagctgctgctcacgagtaaggtcgataaacttaacagcgtatcctgatacacggattgtgaagttagcgtactcaggtttctctgggtgctccatagcatctttcagcttctcaacaccaaatacgtttacgttcaggtgatgtgctccctgatcgaagtatccgtcaagtacgtgagcaaggttctctttacgctcttcatcagaatgtccaagtgcacctgggttgattgtctgtgtattagagattccgtcaagtgcaagctcgtaaggaagcttagcaacagagttaagagaagcaagaagtccgctctgctctgcgccgtaagacgggttagctcctggtgaaagtggctctccagcctttcttccgtccggaagagatcctgtagccttaccatatacaacgttagatgtaattgtaaggatagatgttgtcggtacagaatgtctgtatgtatggcacttgttcagtttgtgcatgaatttcttcagaagccatacagcaatctcatctgcacggtcatcatcgttaccgtatcttgggaagtctccctcaatctcgaagtctgttgcaagaccatcttcgtcacggacaactttaaccttagcgtatttgatagcgctcagggagtcaactacatgtgagaatccagcaatacctgttgcgaaagaacgtttaacgtctgtgtcgatcagggacatctgagctgcctcatagtagtatttatcatgcatgtagtggatcatgttcagtgtatcaacatacagcttggacagccactccatcatctggtcatatttctccattacttcatcgtaatcaaggtactcggaagtaattggctggtaagccggtcctacctgtactttgttcttctcatcgataccaccgttgatagcgtaaagaagacacttagcaaggtttgcacgagctccgaagaactgcatctctttacctgtctctgtagcagatacacagcagcagatgctgtagtcatcgccccataccggacgcataacatcatcgttctcatactggatagaacttgttgttacagaaatcagggaagcgaacttcttgaagttctctggcagtcttgaagaataaagaactgtcaggttcggctctggtgaaggtcccatgttgttcagtgtgtggaggaaacgatagtcgttctttgttaccatagaacgtccgtcctgtccaagtccaccaacctcaagtgttgcccatgtcgggtctcctgagaacagctggttgtaagatgggattcttgcgaacttaaccatacggaatttcattaccatgtggtcgatgatctcctgagcttccttctctgtgatctttccagccttcaggtctctctcgatatagatatcaaggaatgtagagatacgtcctacagacatagctgcaccattctgagtcttgattgctgcaagatatccgaagtacagccactgagctgcttcatgagcatccttagccggctgtgaaatatcaaatccgtaagctgcagccatttctttcatttctttcagagctttgatctgatctgcaagctcttcacgaagacggaaatcctcacccttcatgccgtgtcttgcataacgctcgaagtcatactgttttctctcgatcaggaagtcgataccatacagtgcaacacgacggtagtcacctacgatacgtccacgtccgtatgtatccggaagtcctgtaataatcttgttatgacgagctttcttcatctctggtgtgtagatgtcgaatactccctggttgtgtgttttatgatattttgtgaagatctcatgcagtttctcgcttggctggtatccgtatgttgtacaagcctgctctgccatcttgattccaccataaggcatgaatgctctcttcagcggcttgtctgtctgcaaaccaacaatctgctcaaggtctttcatgctctcatcgatatatcccgggccatatgctgtcagaccggaaacaacctctgtctccatgtcaagaactccgcccttagctctttcttctttctgaagctcctgcagtcttccccataatttgtctgttgcttctgttggtccctcaaggaatgcctcatcaccttcatatggtgtgtagttctcctggatgaaatcacgcacgtctacagagtgtgtccattttcttcccttgaagccagcccactgctcaaaattagccattgaaaaatcctcctatattctctcctaaaatagttttgtaattgttttacgggcatagtataacaccgtgttaaataaatgacaagcgtaaaatcgagaataaatatcggaaatcgctttgtattcgatttagtacaaaatatacgaaaaagcgcccattttacggggaattgtacaaactttagtacagtaaaaatgtaccgtaaaaagaacattttccccatgtgtacagtcggattcatatgcaaataaacagcctgcttttcttcccgaaaatcatctaggtacttttcctctatgataacgatttcgtttcatgttttctctatatttttgtcaatggagttacgttctgttttttgatataatagtgcattagcgtatctatatttagtttatgaaagaggaatattatggaaatcagaaagacaaaaccagaagagcttgaagtacttcttaagatgtacgaacatgcacgcagattcatggcaactcacggaaatgcttctcaatgggaaaacaattatccttctccacagttaattctggatgacatcactgaggggaacagttatgtctgcacagaacaggatcagatcattgctactttctattataaagaaggggctgatccgacttacatgcgcatctacgatggggactggatcaacaactcccgttacggagtcgtccaccgcatcacttccaccggaaatgtaaaaggtgctgcgtccttctgcctgaactgggctttggaacaatgcggcaatatccgtattgatacacaccgggacaatatcgtaatgcagcatctgttagataagaatggattcaaatattgcggaatcgtatatgttgaggatggaacagaacgaattgcttatcagaaagtggtttaataataccaaaatccataaagcaaggagcagagacatttgattttaatgtctctgctccttgttgctatatgtctcacagaatcttgctgcgaaggacggttcttctccacctgcatagagatgtgagatatctcctactttcaatcctcggaaatatgccgttccctgttctctctcttctgttactacttctgtcacagaagtcggtgcaagcgcaaggcaatgccaaagcacgaatggtgatacattccataaatgggacaacagcacgcagctgattccgaaatggcagaaaaatgtcactgtctcatcactttctttctccacacgataatgcgccccttctcttacatatccatgctctgcgagaaagcgatcaaattcttcaatcacatgatcgtatacttctacaagatcagaatttttcgccacttctgtttcacgccatgcatttttatccatataagcttcatgttctgtccaataccccggaaccatatcccatgcaattctaggcaggaaatgctcaccttcttttttcacatcgggatatgctttttcaagttccggatttttattcaaatcaacctgcgccgggaactcttgcagccaatccaatatttctgctgtttttccagttacctcaagacatggagtcgccgtatccttcgctcttccaagtggagacttatagcattcccccatattcatagatactgcacgttttgcaagcagtgccgcttcacgtcttcctttttctgttaatgtgtcatttacataatccggatctccgtgacggatcaatagaattctcatcgtgtttctcctttgtaattaattattttctccagccaatcctctgccagttttggccaactctgtacttctttcagtgtccttcgtatctcttctttttgctctactgtccatttcggtggctgtgttcttccaattccatttttcacaagcagttcttctcccatttcctttggaaatgaagtttctcccgcaaggattgcttctgccagcatacggagttgctcctgtgtataaggttctctccctctgcgttccagccaatcctctgttgcaacagacataccatgcacgccttctgaaaatacatggtgcgcaaatggaactccttcttccagacatttctgtgctaaaagatagctgttctgcaccggaacggttccatctgttgctgtctgccagatgaaacatggtggtatttcttttgttacatacttttcaattgacatatattctaactctttctttgttggattcttccctaaaagagctacaaaagaatctctgtgagcatattttcctgaagtaattaccggataagacagcactgccgcatccggacggtttgaaaacttctgatatttttcatccgggtcctcgatatccgctccatgcacacacagactcgcacatagatgtcctccggctgaaaatccacagaccacaatctgatctgacaaaatatgtaactgctccgaacgaaaacggatgattcgcattgctctggaaatatctttcagcggctgaagctttaatggtgcttcatccagtggattcactgtatattcaaggacgaacacattataaccagcctgataaaattccatagcaaccagatgtgcttccgaaggcgatacaagtctgtaaccgcctcccggaacaaccagcatcgccggatgcatcagctcatcctcatgaatatagctgaccataatcgggataaaaccatgcgccgcagggtaatgatattcttctttgtgccataattctattctttcgcctatcatgtgttaattcctcctgtgtgatttataatttgtgcttttctattattcttttaggagcacggactttgctcgttgctcgcgtaaaaaagccacgaaagacaagatcccccaaccttgtcttccatgactcccattacatacactcaacttgctttacagttcgaatccttccagatatggattctctgcctcagaaaacttctcttcctcaaccatctgcgcgattgccgggtcaagtggcatctttccgagaaccggaacattaagatcttctgcaatctcatcaatgtggctttctccaaatactttaatctctttgccacaatccggacacttcacatagctgtaattctcaacaattccaagaaccggaatgttcatctgcttcgccattccatatgccttcttcacgatcatctgtacaagatcctgcggagatgtaacgatcacaacgccgtcaaccggaagagactggaatactgtcaacggaacatcacctgttccaggtggcatatcaacgaagagataatcaagatctccccacataacatctgtccagaactgctttacaacacctgcgatcactggtcccctccagataaccggtgcttcctcgtcttccaaaagaagattgacagacatgatctttgttccatctgctgcttcacatggaagaattccctgctcagttcctactgccatctcatgaagtccatacatctttgggatagatggacctgtaatatctgcatccatgataccaacattatatccttttgctctcatcattcttgcaagggatgctgtcacgagtgacttaccaacgccaccctttccactgacaacgccgatcacttttttaatagatgaatacatgttcatcggttcatgcatatcaactttcttacttgtgcatgttcctgcactggcacagctggcgcaggattcctctgaacatcctgctgttttctgctcttctgccataataccataacctcttttctacaaataaatagtggtatcattgtagcacattttctcacagaatgataggctgaacctatgcttttatttttctaagtgttatacttatgttaattgttatgttaattcttaattcattctaacttgaatacaattagaaaggagttttcctatatgccagtaatatccgagcagctcaagccaatcgataccgtcaatggattccagatccgtcccggctttttccgtgaatttggtgcagtcgctatcccgggtggtgtcaactttacgattcatacacacggagctacctcctgcgagcttctgctatttcaccgcaaagccgaagaaccttacgccgtgattccatttccggaaagttacaggatcggattctgctattccatgatcgtctttgatctggatatcgaagaatttgagtacgcctatcgattggatggtccttatgatgaaaagaaaggactccgttttgataaaaacaaaatcctgctggatccttatgcgcgcgccgtcaccggacagagccagtgggggcatgtaaataacgcccagcatggttatcgtgcccgtgtggtacaatccaactttgactggggtgaccagcgtcaccattctattcctatggaagacttgatcatctacgagctacacgtccgcggatttaccatggatgaaagttccggtgttaagcaccacggtacattcgaaggcctgcgcgaaaagattccttatttgaaagaacttggagtcaatgctgttgaactaatgccaatcttcgaatttgatgagatgcgtgatgtacgattgattgatgaaaatgaacttattgatttctggggatataatccggtcagtttctttgcaccaaatacaagctactgttcttctatggaatataaccacgaaggactggaactcaagacactgatcaaagatctccatgacaatggcatagaagtgatcctcgatgtcgtcttcaaccacacggctgagggaaatgaattcggtccgtgcttttctttcaaaggctttgacaacaacatttactatatgttgactccggacggacattattataatttcagcggatgtggaaatacactgaactgcaatcaccctgttgtacgagacatgattttggagtgtctgcgttactgggtcatcgaataccgtgtagacggattccgttttgatcttgcttccattcttggacgaaatgatgacggaacccctctaagccagccaccgcttctacgaagccttgcattcgactcgatccttggaaatgtaaaactgatcgctgaagcatgggatgccggcggactttatcaggtcggttctttcccttcctggaagcgctgggctgaatggaatgggcgctaccgtgatgatatgcgccgctttttaaaaggagatgacttccttgcccagactgctgcagcaagaatcacaggttctcctgatctgtacgatcctgcttaccgaggtggaaatgcttccatcaactttctcacctgtcatgatggattcacgctttatgatctgtacagttataaccagaagcataatgaagccaacggttgggggaacactgacggagctgacgacaataacagctggaactgtggcgtagaaggcgaaacagatgattctgccattctggcacttcgtaaacgactgatgaaaaatgcctgtgccgttctgctttgcagccgcggaactccaatgttcctctccggtgatgaattcgcagacacacgttacggaaataataacccttattgccaggataacctgatctcctggctggactggagtctcctcaaaaaaaataaggatctgttcgatttctttcaatatatgatccagttccgcaaagatcaccctgtcatccgtaaggatctcgagccaagctatcttggtgttccggcaatgagcacgcatgggcccactccggatgagacaaatttctccggtgacagccatgttgtctgtgtacaattcgcaggctataatgaagcaacccaaaaagaagaccttgtttatctggctgtaaattccggatggtttccggtcacactcactctgccggaacttcctgaacattacaaatggaaagttgcggtcaacaccggcgatcctaaatgtcagttttttcacaaaaattcaatgcctacggtagaatctaaaatatttttaggtgaacgctctgttattattttcgttgctaccgctatatgaattaaatttttttagctgtttctcaatattttttagaatatttttgtttatttttgacaaccttgttgtttgtataataaataacaaggttgtcatttttttaacttttcttgataatttttagatttatttgtagaatattactaaatgaaactttactggtttgaagataggttttttcaaatacatttcctattttaaaatcagtcagtaatgaacgttatggtaaaaggagaggtttaaaatgagtagacttgaaatcccaggtccagacaaaggccagctcgtcgttgaagagctgtacaaagatctggaacgcagaattgaatccagccctccgggattatgtccggttgacatgactcgtgcattcatcgagatgtgtcagacacaatcctgtggaaaatgtaccccgtgccgcgttgggctgtggcagttgaagaaccttctgacagatgttatgaacggtactgctacaatggagacacttgatctgattgacacattgtctgaatccatccgcgaaggatctgactgtccgatcggatatgaagccggtgccatggtacataagagcttaagagactgtcgcgaagattatgaagaacatgtccgtcagggacgctgtacctgccactatacacagcctgtaccttgcgtttctctctgtcctgcgcatgttgatatccctggatatatcgcactgaccggagagggccgttacgctgacgcaatccgtctgatccgtaaggataatccgttcccgacaacctgcggttttatttgtgagcatccttgtgaggcccgctgccgtagaaatatcgtagatgatgccatcaatatccgtggactgaaacgaatggccgctgattatgcaggcaaggttccaccaccggaatgcgcaccttccactggaaagcgtatcgctgtcgtaggcggtggacctggtggactcagtgctgcttactacttgcagttgatgggacatcagacaaccgtattcgagatgcttccaaagctcggcggaatgctccgctatggaatcccgaactacagacttccgaaagatcgtcttgacgaagacattcaggcaatccttgagacaggagttcaggtagaatttggaaaacgtattggtaaagatatcacaattcagagtctccgccaggaatatgatgctgttcttatttccatcggtgcaagcactgataagaaacttggtatcgaaggcgaacaggcaaaaggcgtaatctctgctgtgtccttccttcgtgatgttggggaagacaagagccctgatctcaccggacaggaagttgctgtcatcggtggcggtaacgtttccatggacgccgtccgcacagcaaaacgtctcggtgctaaaaaagtaagtatcgtttacagacgccgtactgcagatatgactgctcttccggctgagatcgaaggtgcagttgcagagggaattgaagtactcacactgaaagcgccatccagaatcgagactgatgagaacggacacgtttcaggtatctacgtcacaccacagatgatcagcaagatcaaagatgggcgtgcaagtgtctgtccgacaggtgaagaagatttccttatcccttgtcagacactcatcgttgcaatcggacaggatatcgaatccgaacacttcgcagaagccggtgttccggtttcccgcggtaagatcatgacagagcgttatggcggtttcgacaacatccctggcgtattcgccggtggagactgtgcatccggtcctgcttccgtaatcaaggcaattgccgctgcaaaggttgttgctgccaatatcgatgaatatcttggtttccaccatatcatcagctgtgatgttgagattccggaacctcgcttaagcgaccgcgaaccttgcggaagagttgaactgacagaacgcgaagcatgcagccgtgtctgtgactttgaaggcgttgaaaactgtatgacagaagccgaagcaaaacaggaatcccacagatgcctgcgctgcgatcatttcggttatggtatctttaaaggaggtcggaaagaaaaatggtaaatattacaattgataatcagaaaatatccgtaccttccggaactactatcatggaagctgcggcaaaacttggaactccgattccgaaattatgttatttgaaagatatcaacgagattgcggcatgccgtgtctgtgttgttgaaattgaagggaaagatcgtctggtcacatcctgtaataacgttgtaaccgaaggcatggtgatctacacgaacagcccgaaggtacgcattgcaagaagacagactgtacagcttatcctttcccagcatgactgcaaatgtgcaacctgtgtcagaagcgggaactgtacacttcagcaggttgcaaatgatctgaacctgattgatcttccgttcaaagaacgctttgaagatacaccttgggacaagacattcccactcatccgtgattcacgcaaatgtatcaaatgtatgcgctgtatccagatttgtgacaagatccagggactgaacatctgggatgttacaagtacaggttcaagaacaacgatcaatgtaaacggaaataaaaagatcaatgaagtctcctgttctctctgcggacagtgtatcactcattgtcctgtcggcgcacttcgtgagcgtgatgatacagaggatgtatggagtgcgattgctgacaagaagaaagtggtggttgcacaggttgctccggcagtccgtgccgcatggggagaagctctcggcctgtccagagaagaagcaacaatcggaaagatcatggatgccttgaaaaagatcggcgtagattacgtcttcgatacttctttctccgctgaccttacgatcatggaagaaggaaatgaattccttcagcgtttctccaaaggagaattaaagctgcgtccgatgttcacttcctgctgccctggctggatccgtttcatcaaatcacagtacccgcatctggtaccacagctgtccacagccaagtcaccacagcagatgttcggtgctgttatgaagacttattttgcacagtccatcggtgtcgctccggaagacatttacaccgtatctgtcatgccttgcgtagcgaaaaaaggtgaacgcaacatggaacttttctacggcgagtatgccggacatgacattgacacagttctcactacaagagagctgacaagaatgatccgtgctgcgcatattgatccaaagagcctgaaagaccgcgaatgtgatccacttatgaaagagtggtccggtgccggtgttatcttcggtgctaccggcggtgttatggaagctgcacttcgttccgcacactatcttgtaacaggacgtaacccggatccggatgcatttaagattgtccgcagtccatcctttgagacgggtgttgtagaagctgaagtccagatcggtgatgctacgatccgcgctgctgttgtcagtggtcttggaaatgtacgcaaactgcttgaagcaattgaacacggtgaagtacactacgactttgtggaagttatggcctgtccaggcggatgcgtcggtggaggcggccagccgatccacgacggcgaagaacttgcacacacacgcggtgcaaacctctacttccttgacaagaacgccaagatccgtttctcccatgagaatcaggatgttatgaaattgtacaacgatttccttgagaaaccattgtcacacaaatctcatatgctgcttcatacagatcatacaaagtgggatatgcctagataataattcctatataaaacaagagccagaacagtgggaagatgcggtgctgtttctggctcttgccaaaatcaggcaggacggattcattttcccgacctgcctgattcatcatattcttattctactgttacactctttgcaaggtttctcggcttatctacatcaagtccctttgcaacacttacataatatccaagtaactgcagcggaatcactgcgaggcttcccataaagtgttcatccaccttcggaacatagactgtaaagtctaccttgtcttccatctcataattgccatagtttgtcacacccatcagatatgcgccacgactcttacattccatcatattgctgactgtcttctcatacagcttgctctgtgtcagaactccgattacgagaatattgtcctcgatcagactgattgttccatgctttaactcacctgcggcataagcctcagaatgaatataagaaatctctttcaatttcaaacttccttccagacacactgcatagtcaactccacggcctacaaagaaaacatcatgtgcattcgcatatttggctgcgaaccactggattctctccttatcctgaagaaccttttctatcttctccggaattgtctgaagttcagaaatatagtagctgtactgctcatctgtgatcagccctttcaccttcgcgaactgaactgcaatacaatcaagagctacaagctgtgcgctatatccctttgttgtagcaaccgaaatctccggtcctgccagtgtatagaacaccttatctgcctcacgggcaatactgcttccgattacatttacaactgcaagtgtagcaagtcctttatctttcgccatacgcatagctgccaatgtatctgcggtctctccggactggctgaccacgataaccagaccatccttcacaagcggcatctcacggtaacggaactcagatgcaagctctactcgaaccggaatctgagccagctcctcgatcacatactgagcctcaactcctacatgccatgcagaaccgcacgcaacaatgtaaatctggctgtatttcttaatctcttcctctgtaatatcaatatccgtaaagtcgatcactccgtctttcacaacagaattcagagtatcacggattgctttcggctgctcatagatctctttcatcatgaaatgctcgaaaccggccttctctgctgcctctgcatcccatttgatctctgttgtctctttctcgatctcgtcaccattaagatcatagaaatgagcctctcccggaacaagctttgcaaactcaaggtttccgatatagtatacatttcttgtgtatttcaggattgccggtacatcagatgcaacataagtctcgccatctgcaataccgatgatcattgggctgtcttttctggcaacccagatctctcccggataatccttgaacatcagctcaagtgcataagaaccacgtacacgaaccatagtcttggcaatcgcatcgatcggtcctaagttatatttcttataatagtagtcaaccagtttgatcactacttctgtatctgtatcactgtagaatgtataaccatgctttaacagcttttctttcaactctgtatagttttcgataataccgttatgtactccgacaacctcagactcaactgtaccggatccacttctctcacagtttccggatacatgcggatgtgcattgatctgacttggctcaccgtgagtcgcccagcgtgtatgaccgataccgcaagttcccttgagtgccttaccactgtctgtcttctctgaaagattactcagacgtcccttcgccttaacaacctgtgcaagatgctctccgtcacgcactgcaagacctgctgaatcatatcctctgtattccagcttagacaatccgtccagcagaatcggagctgcctgatgatttcctgtaaatcctacgattccacacataaataattcctcctattaactatctgcagttactgttcacacgatgtgcgaccagcaacgcatctcgccattttaaatcgcctttggcgatggggcgagatgcattcaagccaaaacatgcatcctccgtgtcaatcagcgaagtgattgacacgggagtgaacagtaactatctgcatccctctctacaaatagttatatgcatttccatgttgttttcccttttcaatgagcctatcactttcgtaattgttacaaaaaagttaaataactcattcgttagtgtaacacagataggcgaaatagggaagtaaaaaatgcattttcttaatcactttcccatcactacagtggccagtccgggaaccttccgttcacgatcgcatgcatgattctgtccttcgcccctggcgtctccctgttgatctgctccatcaactgttttgcatacgctctttttgttgaaccgtctaccggacacgtattcttaaccacacggattccctggtctgcaacaaagtgcgctacaccttgctccggaacatacatcatcggacggatcaccgtcactcccgcttccggcaattctgtcactggtgggaatgcatagaaccgaccttcatagatcaatgacatcaatgctgtctctataaaatcatccttattatgtgcatatgccatcttattgattccaagctctcccagctgttgatacatcgcacccttccgaagctttgcacacaaagaacacggtcttgtatccttattctcctgaaatacgatccgggcaatctctgtatcgacctgctcataaggaacctccaggtgcttacaaaactctgctacgcccgtaaaatccatcccttcaaatcctacgttgcaggtaatcgcagataattcgaacctcttcgggtaaaattcctgcagcagcttcatcgcataaagcagagtcagggaatccttgccgccggaaacacctactgcaatcctgtcaccgtcttctatcatgttgtaatcttgtatcgcctgacggatcagacttaataatttctgttgtttcatctttcctcaactactactttgcatctttctatgttcatcacataaccttccaaatattagtttcataatatcacttttccataatactttacaacaattttgcgaaattcaggttgcggattttgtaagcacctcttatactttattattatgttaactgttcagagccaagcaaaatttcaaaaaaagatgtaaaatgcttgcatttttaagactgtttttgaaattttatttggcggatacaccacaccttcaaaatgcgtagcattttgaaggttggctctgaacagttacttattatgtacgaattcggagggatgaaagcatgaagatacttctgatcaatgggagtcctaaaggtaaaagaagtaattcattaaagcttgcatacagtttcattgaaggatttaaaaatggatgtacggatgatgaagaaagcatctccatcgatgaactccatgtagcttcaatgaatatagctgcgtgtaaaggatgctttgcgtgctggcagaaaacgcctggcatatgctgtatcaaggatgatatgcaaaaggttattgaaaaactgattgatgctgatcttattctgtggtcttttccactgtactattttaatgtcccaggtatcttaaagaatttgatcgaccgtcagcttcctatgagccttccttttatgagttcaaaacagaacggatacggaagcggaagtcatgactccagatatgatatggaaggtaaaagacatgttctgatttccacctgtggcttttattctgctgttggaaactatgacagtgtattgcggatgtttgatcattttctcggcaaaggaaattatacgaccatcttttgtggtcagggagaattattccgtgtaaaagaattgtctgaaagaacagatgaatatctttccactgtaaaatgtgccggctcagaatatgcaatgaccggaacaatctctgaagaaacagatgcaatactccacacgcttttatattccagagatgtgtttgaaaaaatggcagatgccagctggggcatcagtaaaacaaccggagaaaaagaacctgatgatcttgtatttacccggcaaatggccgctctttataataaagatgcctacgatggaaaagaccgcgtgcttgagattcactttaccgatttggatcacacctaccagattcagcttagcaagacaggaagtgaagtatttactgatggacgtctttctccaactactcgcatagatacgccttttactgtatggtcagctatttcccgtggagaaatcggtggcgcagaagcattggggaaacagatgtatacggtatccggcgacttttccttgatgattgattgggataaaatcttcggaagcgcatctgtggtcaaaaaaacagagaaaacatctcaaaatacaattaaacagaaaaatccttctatgacgacaatgctgataccatggattacgttctggatcgctgtttctattcatccggaagtcggagctgtgataacactacttgtggtcgcaacagtaccgtttattatgagaaaacataaatttgtcatctgggatcagctctctatggcagctgttgctatactttctgcagcggcaaatataaccggaaacggagttcttccaacaaacatcggatatcttgtatttggactcttctggctgctttcatgcctgacaaaagaacctttatgtgctgcatatgtaaaatataattatgggggtgaaaatgcgcatcagaaccctctctttatgaagacaaattatattcttgccgcggcatggggcatgctatatatactgacagcaatctggacctttctgtttaagaaagccgggtttggaaatgtacttatccttttgaataatctgattcctatattgatggggcttttcacagcatggtttgaaaaatggtattctgcacggatggcaagaggcaagagaaaatagtattttctcttgcctcttatgattcttaactaccgctttcaatatatcttctgtacgcccaatctgttgcctgattctgcacagcaagattccaccacagatcataatgtattacaatatctgctactgtgagattcagtccggttcctccggctttcagtgaaatacagaaaacagtggtatcatccttgttaaattgttctaccatctgtaatcttttctcttttaaagtgcttcctgttaatttataaaaagagattttttcctgttgaaagcgttcttccagacggtcaagcatcgaagtaaactgggaaaataacaatattttatgcctttcgcaatattccatatattccagcaatacagtgtttgcaccccccattataactgtaatacgcagggcactcacatgtcatctcataaacttcctgatctgtataatcatattctcctgtgatcatatctctcctgcacttccgttacatattattgatatctcttgcactatttatattcctggcactattacaatactgctctgcctcagtatgctttactccattaatatttataactcaaactctttcaacagcttttcctgatattccttgtcaactgccgctttcaatatatcttctgtacgcccaagctttgacaattcaatatttaactggttaattctgtttactccttctgttcgtcccttttctcttccttcctccattccaatcttacggccagcttcgattcctcgtctttctgcggttaacattcctatattgtaatctctgattgctcgttgtcttgtctcgtattctaacctcttcttttcatctgcgcttaatttatccaacacatcatatgcttcttccaattcagaatttttctttgccatttcttcaaaatcctttctggtttttcttccaagaaagcgcatccactgcaacaggcttgtctcatttttctcttccggcggaagttttgacaattctaagatatgcatctccataagatctgtatactcttttcctatcttcgtgttacagaacatatctttgctttatgggggcagaccaccggtaacctactgtaaaccaaactcttccaataattttctctgatatttcttatccgctgctgcttttacgatatcttctgtacgtccaagctttgataattcgagaattaattggttgattctgttttctccttcttccattccaatcttacgaccagcttcaattcctcgtctttctgcggttaacattcctatattgtaatccctgattgctcgttgtcttgtctcgtattctaatctcttcttttcatctgcacttaatttatccaatacatcatatgcttcttccaattcagaatttttctttgccatctcttcaaaatcctttctggtttttcctccaagaaagcgcatccactgcaacaggcttgtctcattcttctcttctggtggaagttttgacaattctaaaatatgcatctccataagatctgtatacaattttcctgtcttcgtatcacaaaatgcaattctccgatagcattctttatcatccgggaaatgatcatatgcaagaatactcacatggatacacttcttcaagcaatcgtatccctcaccttctttaatttcacctgcatacatcttgctcagataatacacagaacggtttgcccaacaatcaaaggcttctacctgcatctcaaaatcgatttgttctccgtccttcagtttcacccggacatctaagattccatacttatcatctttcgattcttttctaagaatcgtaggcatgagttctgtattctctatctcactggacggaacatttaataatgctgcaatgatgttcttgcggatattatcattctgcatcagttccttaaaacagaaatctaccgttggaagcatgataaaatcttcctgcttctctttcgctgtttggcactgtgatgttgctttcctggttgatacacttttcctggtttttctcatagaattctcctctcttctgtgcaatgaatgattgcctaaagaagaggattctaaagttatatttatcttaacacaagatagttttctatggaagtaactatctcttaaaatcagatatttgagaaatttactacatcacataatcttcaaacaatattcatctttttggttttgtcatcggattatctgctcggaaatctgagcttattgaataattaccgatttggttcatagatctttttgcagttcatcagaataatgactgcgtggtattagattagcatgagaattctattattgcaagctgaaatttttaatgctctagtgttcacaggtgttatgttactgttcttactacgtgcaccagtagcgtatctccgcatcaatccgcaagtagaagaagtgccggaatatctaaagactattccaccaacacttcttctacttctttactgtacttacaatgctttgtctaaatacatcttatcgtacattaataaaacttttatacattattcattttttctttatggaatcagaccagcggtgtcgcaatgccagttagccatcttaacttaataactttttttcaaaaatatataccagcctttatttacaccatttttctcacatttgatgttttcaaggctggtacttttttaacacttttgtaataactttttgttccattattactttttttacttgacattcatttgaaaatgtgcggctgcgttatctgacaatcctgccagataacgcagcccttagattaataagagatttttaattcacagtcagtaaaatctctaatctaaggaggcacatttatattatgaacgattatccatcaaatgtaaaagaaaaattgaattttattatctctgatatggcaaaccaccattggctcttcgccaatagatctgggcatgattttatgcgtcagagccatggtaaactttctttttatgatactatgcgactgattattggtatgggaaaaggtaacacaaatgatgaaatcatggattactttgatcttgatcctgatcgcatttccaacagcttttgaatcataagcatatttattttatgcaatttcgcgtaattaaaatgaaagtggctgaagattcttatgagtacatcattacaaatttaccgtattcttttgatctggaagatctcaaaacctgctatcactggcaatggcagatagaagttgcttttcgctatcttaaacatgctaacggacttctctacttctattcaaagaaaccggagtatttaaagcaggaaatttatgccaacttgattctttacaacttcggcgtatttcttgccaatgaagcaatacaggaaaatcaaaagaagaagcatcgtatcactaacaaatatcaatatgaagtcgattttcttctgcacttaagatttccagaaaatattttattcgtggacgatcatcggaaaatcgaattataaaactcatagctaaatatattcatgctgtcaaaagtgaatttcgacaattttcacgtcctttacgcggaattggtgctattcattttggatatcgatagtttcttttaatcaaatattatttttttgacagatttcttatctgtctttttggtatgccttttttactgattttctctcaattttctatacccattttcagattttgacatttattatccaccaaacactttatcgaacaattagcttaatggcattgtcaatgctaccttcgcaatgctttcaacacatatttgaaattataatttttcccaatacttgcgatattttctcatatccgttttcattcggatggaagcgatcattacaaaatatttcgttataatccactttatctataatatctttttgcatattatataaatcagcaaatcctacaatattagagcttttcgtttctaaattgcttaagaaacaatttgcagcttcataattttcaattgttttttttgtatatattttttcatcaacccacatcgtagatgcacaaatcactttataatctttgacttcatgcaaaaagctcatatacttctgctcaaattcttcttctgacaaatattgcatcgtcccttgtgttgcaataacaactcgcttccatatttttctataaagattgtctgcacaatctagtatatatctactttttctgctagacataaagggtcttggatttaacattcctttgatatttttatatcgcttcggagttatactaaggattccccatttatttgtattcatattgggacgcacttgtaaatcgacagaaccatacataatgatcacataattcggattaatcttccttatttttgatatctgttcaaaagcatgattgattgtcgttcctgttaatgccaaattaaaaatactactttcaataccgtttgcatttaaataactttttaactttttttcataatttatttgacgtgatcctattccctgagtaatgctatcccccagcaatactattttcactttttcattcattgcatcaatttcctatctcttcgcctttatacaaactacaaaaaacaataatcaatggaatcacaaatgtatattgttcaaacaaacttccagaaaacaaaataagaactgttactcctattaaggctaacacataccatttgtatcttgaatttctatatactgtctgaaatacttttatcatttgagttataaacaatgtaacccccaaaataccatactgaacaataaaaacagtaaagctgctatccatttcgattgaacttgcgcctaatgatcttgctgaatttgttccagcgcctaagccagttccaaaaataatttgccaaaatttcaattcaaataagtcactccaagccttaaatcgaccagttcctgattccatcaaattgccacgtccgacatatgttgtaaggttcgatataactactgctaaaactactatcgcaattaatggaatcgccaaaatcttaccaatttgatttaaccttgatttttccattacggttaccaaaattataataactgcatatataacgcaaccacgtgaaccagatgctaatgcaagaaatattgaaattagtgaaaacaaccaaaactcaattttcaatgtttcattattcaaaaaaacatagcagagataaactactgctccaagtgagaaataccccagtgttcccgcattcgtaaatagtcccatcattcggtaggcacctgatccaagctgaattcctccaccagctaatcctgcttgaatgacaacacctaccaattgaagaagaatcattatttccacagttctcaaaaattttgtccaaaagttctcaacaagttcgttcttccaacaatagcaataaactacaaacgaaaacaaatatgcacgaattcctcccactacgcatagcaaaccatttccacttacaattgctaatacaatacctaaaaaaattgcaaagaacaaataaaaccagtccttttgcattgtataattcttattttctgtaaataacaaatatgtcgccaaaagaacaatgtatatatcttttgcgtaattgataatacgaggaaaaactccattattaagcgtaatatcctcgctataaccccaaagcaccaaagtccctgtcttatatgcaatcacaaaatatccaattcctgtcagcgttactagtatgtacaatatctttaacgcatttcccgtttttttcactttattctcctacttatattatttgattcttataaaagcaagctattttcttctcatattttttccatgaatacttattcattgtattttgagcattgcagctcattttataaactaattctggattttgtacaaacttctcaacagctaccactatgctatctgcattcttaacttcaataataataccatctataccatctgtaacaacgcttcctgtatttcttgttacaacacatggcataccagatgccagtgcttcgtaaacactaagtgaggacccttcagctaaggacggcaagataaatacatcattaatatcaaaatactcaaaaatctgttcatgcggtatccttcctatatattccacattttccatacagttcatacgatcaaccaactcttgtccattgcttgttgttgaaacacctatcacagacagtttaacaggttcattttttaatttctccatggcatctaaaagaatttcgattccttttcttttgcttattgatgcaacaactaagagtctcaaaatctctcccgatttatactgtcgtatcttataagaaaattgctgtgtatttgccccatatggaatgaccgtaattttattctcgacatttttattttcttctatccctagaatagatttttttacaaaatctgatgccgtcaatatatagtcaactatctgaagattttctctctgtttcaaatcttcaccgatgcttttatcgtcaaaaaaacgctccatataataagctgttatctgctcatacactattttaatatttttcttatttgctacacggattactttattctcgtaatcctgcaaaacatgaatgcaatctatcccttttagattatgaattgcccacgtttcaaaagcccaatcatacaatttttgaaactgcttcggtttagcttttgccatcaaaaacaatgctttaacaaaaaaattggtttttacacacgttgatattctttcatatttataaccatcaatttgtttcttccatttagtttttcttacaattttatctaaaaaatcattcttatcgtaataaccaaacaaacctataacttctgctccactttccatgacacctgccatactataatagacatgatgttttagcggatgtataactgcaactcgcatctttctattcctttcctaccgattatctatctaattacacttttaagtaccttttccacatttttatcgccaattcaacaacaagagcaattgtccaaaacactgcaaatatacatacaaacgctatcatattaagccaaacattatatgtagcaaaaactttttttaatgcactagcaactttccatgtgattaatgcggatatcaaaataatgccaaaatttctcattgacattaatctaacttctgcaaccttttgcttcataaataaagctaatattgctaatgaaaatattgccgccaacgatgttgcataagctacaccttttattcccattatataggacagcaataaattcaatccaacattaataaatacagatgtacctgttacaaagctaggaaacttgcttttttttgcggcgtaataaacatacatacatatatcgcgaaggacatataccggcaaaccaagagcatacccttttaaaatttccccagctattacagcattatcttgtgtatagtttccccttacaaacaaaattgaaatgatctctgtgctaaaattaaacaaaatgataaaacacggcacaataaacattaaaatcattttagtttgcttttcaacgatgtccttaaactcttttttatcacctctcatgtatgcttttgtcatagttgaataaataatttgcatcaacgatgtagaaaaaacggtgtatgcaaggccatttacttttgatgctaatgacaatgccgtgacacttccagtcccaaaaccagaggctacttgattatctacaagagtattaatttgcaatagtcctgaacttaaaagcattggtggcataagcaaaaagaaacttttaattttagggttattccaataaaaatcaagtttcggaacaaaaccaacgatttttagcccccctactaatgccactgacttaattgcatatcctaacacaacacacgcaattaaaatatatggtgatgtcaccccacaaaacagtgcaatcaatacaggcacaggaaacaacaaatccattattgttgggtaaatatttctattgtataaccgcatcacaatctcatacgctgaaatcagtactaaaaatattaatgcccatgcactaatcttaatcaattcacctgccaaaataatggtatcatcatccatccctgcagccattaactttacaaagaatcgaggaaataaatatacaagtccaataactatcagcataagtattacacttatcgtaacaatctcattgactgttttattcattctctttttatcttgcgtatattgttctgccgcaattggcatcaatgaattactatatgcggaactaaaaagtccaaatattgttataactagcaaataagccacattataagcatccgaactagttgaagcgcccaatgcttctgctattttcatctcacgaagcaggcctaatatttttcctagcattgtgcatgcaatggctattaggcttgcaatttttatttgatttgatatttttgtattcatctgataactgttaaaaccatcctaaaagcagatttttcacttttccaaagtaacgttttacctttataaatatttttgctttttctccaccgtatttaatagatactttctttgactcttccatgaacttctgtggatccgaactttgtcctgttatatcatatttacaaatagctttattgacatactcaactgtataattatttttcaaaattttagtcagccagtccctatccgcacataaccgatattgtatatcaaatggataccgacacagcacttctcgctttgcaaaaattgactggtggcaaatcatatattccctatatacacaattgaaaattgttgccttattcttttggactgtgattattccatttttttcaatatctccataataaatatctgcatttgatttcatcttctgaaccatatcatttaaaacattttcattacagaagcaatcaccaaaattcaagaaaaaaatatattttccagaagcttttgacacccctttattcatcgcatcataaatacctttatccggttcagagaatattgtcatatatttaaaacatttcctgtgtttttctatttcctccactgttccatctttgctttttccgtctattacaagatactcaaagtttttatatgtctgtgtcttcaatgattcaatagttttttctacgtcttttttacaattatatgaaaccgatataattgtaatcagtacattcttcatagcttttcctttcttcatttccagttcagattaaaaatatctcgatatcctgtattttttgctttattattgcttacctctatcgcatactgatgtaccttttctgtcaccttttgaaattcactctgctccataacagcatatttctcaactgcattcacaaaggcgcttttattttctaacgaaaaaacatatcctacacctttcgattcgaaatcctgccacggtgtctgattgcttataatacatggacaccccgctgaaagtgcctcctgaattacgtgtccaaaattttcgcctagggttgggaagagaaaaacatgatattgttttagtgtctccaccacattctccgaattaaggtttcctttccagtcccatttcacattatcgggaagtttagcaagttcctgtttacactcctcccaatattcttcggtatgtgctggaccatatatagtaaattcaacatttgattttgtttttttcaggatttcaattgcatattttaagttcttctttggtgcaattcttgaaatccaaacaacctttaaatttccagcttttttctctttttcaatgctagttccactaacttttcgaggtaaatcctctgcaataaaaaattgcttatcagttgcctttatttggtgttttatttccgagatttccatttcagatgttgctgaccaatatatatttttgaacattcctaacatattaaatattgttgtaaatgttttcttctttttgtactttaattgaaattccttgggcgaaaacaatcccatcgcagcaacaataaccggaactttaattttaccaagacgatttgcaatcaatgtgttaattgcataatcattaaagcaaccgcaaacatacaccaagtctacctgcctagcaagttccactattagcttctggctaaatcctttcggcggaacataatatacatccgcattacctacacaattccagccattaactttgatgttcggataggcttcagtatctccatgatctctatcacaagtcagaattttaaagttgtattcttttcccaaaaaatctgtcagattcttaatggaacgtactggtcctccgtccttatatcccggaagatatcgtcccataataatcaaaatatctctacgcccatccgtcatcgctcttctcctcttatgctttcaaatctccctgtggcttcatcttagtaccatttttctcacattcgaaaatcttggcatctaccaagaaacgataccaatatgcctgcaagaaatgaaatatctttccttctggcccatctaagaagcctagcttaatgtaatatcgatagatgaaatacaagtgcgcacggaagaacttcggcagtctataatagccactattctttactactcgcttcatctttgcttgtccagacgacgtgccgtcttgttcaaggctttcatccattgcattttcaagtgtcatctggtgatccaacacctcccggttgctgtaccagttatgttttgctgtccaccattccaaatccttctgattgttatcaatcaaatcatgcttgaactcaacagttgttccctcggacagaatcatgtgttcatccatgattttcatctcgcaggaagctttacctgtccggaaaatacggagtagcaactccggatagcgaccaccgtgcttgatccagcgccccataaaataaactctgcgtcgcaggataataccattcacaggttccctgacatttggaagtttctcgtcaatttctgttgccaagttttccataatttcttcatcagcgtccatgcgcattgaccattctgtgtcaatgccagtattctgaagtccccagtttagctgatccgcataggaaacccatttgttctggtaaaaatcaagtgctgaaccaattttctgaagttccgcattcaattccttgcacagtgcttctgttccgtctgtactgaagctgtctacaataacgaatctcttggcaactccacaaaaagactccacacactttctgagattcttctcttcgttttttgtaagaataacaactgttaaatctgtcatgctgccaccaccatttctgtgtagtggcaccctatatttgtaaaggtaaccagcttatcctgcgttacccccccattaattctggaggaggttgcctctaatgctccttgcttttccatctttactcctaacttttcacattcatacaacttggcatccaccaaatagcgataccaatatgcctgcagaaacgtataaatctttccttcagtaccatccaaaaatccaaatctgaaataatatctgtaaataaaatacaaatgcgcccgaaagaacttcggcaaactataatagccatgattcttcacaaaacgctttaccttcgcctgcattgacgtcgaggtttcttccacggattcctctccatttgcatcatccgacttcatttgctgatccagcacttccttatttgaataccagttatgcttattgatccaccattccaaagatttattattattatcagaaaagtcatttttgaaggtaaccacatcaccatccgtaacaataagatgctcatccatgagtttcatctcggacattccatgacccacacggaaaattctcagtaaaagttccggatactttccaccgtgtttaagccaccttcccatgaaataaactctacggcgaagaattacaccgttcacttttgcagaaagagtatccagcttttcgtcaatctcatctgccagttccgaagtaaactcctcgtctgcatcaaccttcatcacccactctgtgttcaggtcaatgttatccagagcccagttaaactgtacagcgtggttttcaaacggatgttcataaacttccgcaccgagtgactttgccagctccactgttttgtcagtcgaataggaatcaataattacaatacgctgtgccacgctcttaaaagatgcaatgcacttttctaagttttgctcctcattctttgtgaggataataattgttaaatttgccatttttcatttttcctattgtgaaatacgttacatatgctaaagtaactgtgacaactacaaaagcaagaactgataccaccgatggctttatcatccctaatgtaaaagcatgaaccagataaatctcatacgaaatcattccggtcacagctaacatcttgttttcagataactcgctgaagaattttccaaatgccataattcctattgccatcggcaagcaggtcaatagcgccattacattcgacacaatgtacggcaggcttttaaccgcattcagttgtgttattgccatgaagagaaggcctactgtaccccccccccgttaaaatcaggatatttttagctcttgtcagcgtccgttcaatcttatatttatttactgcaagcaatacaccagctgggaaagacagcatctgtcttgcacgaaggaacggcatatctggatttgcaaagaatacagactccaacacaaaccagatagtaaaggttccaaacagcgccatcgtctgcattctactatctttaatcaatctctttactacgtaaaaaatcagatagcagaggacaatatatctcatgaaccaaccgtaactggttgctgatttcaaaaagcagaaatccaacagataggtcttaatggaaaacgtacctgtgacaagcagtcctactagctccactccccagaacggtaggcacacacttagcaagcgtttcttccagaagccctttagcctgttcttctcatatgaaacctctaatccatatccggagcacatcagaaataatgccacgccaattcctgcaatgaattggattccacccacggaaagccttgctccactatgcgcccagacaacagtcagaatagaaaatcctttaattgctgttgtataatttctgtccatccactggtatttttccggtttcttgacaacccccagcaaatagcatgtaaagataaggaacgtgagaaaggcaaaatacttcatcagttcttttcctccaacctcttaataactctcgccgggtttcccgcaatcacacagttatcctcaaattttccagcaaccaccgcaccggctccgataacgcagccatcacccagcactgtgcccttcagtattatcgaattgcacccgatgaagcaattctttccaatcttaatctctcggctcggcaccaaatcactatcaccgccattttcatcccgtagcagtttatttcttgcttctgcctcgattggatggaagtcattgtccagaatcttgcagttgccgccaatgcaggtattctcgccaatcgtgatcttctttcgagcgtaaattgttgctccacttattccaacgttatcgccaatctcgatctctgctcccggagcgcgcgtgacaatgatcgtcctgctataaagaccaaccagattactaaggaagctactcttgattgtaacgttctcgccaatctttagcttggcaccacctttgttgaagatgattggcacacccttcagcaagaggttctttccatattcaactttcgtcatcttcataaccagcttaaaccagttactgttcatatctcttgcctccctcacagcttcagaatttcttctgcatacttcctcactgacacatctctggtcagattcttctccagattctctcgtcctctggctcccatcatcttcagttcatcacttccggcgttctcaatgaaccagcggatattctcctcaaccttgtcatactcacccggctcacagcaaagaccaccgtgtgtatcttcaatcagatatcgaacctcggaaccttcttcaagcactcctaatatcggcttagccgcagccattattccatatgccttcgacggacaactcactcctttaatgccttttgcgttcacacaccagtgaacatcaccagcgttcaggctataaatcaggtcagccttatcctgatacggaatgaaaaccacattgtccatatgacgctctttcacatagagcaccagcttatccagcacagaaccggcaccaacaaaagcaaacacaacctctctgccatccgcagtcttagtacccggcttaattctctccacaaccttcatcagattctcaaggtcatagtacaggccgatattgccggaatacataatgacaaacttgccatcaagaccgtacttcttcttgaaagcaacaactctttcatttctctcattcagcggatagatttcattctcatcgatccagttgttgatcatgacagtctttgggactttcttacccttgaagcggttctccaccgtctccaccagatcacgaccaaccgtgattatcaagtcactacgcttgcaactgaacttgtcgaaccacatcatggcatctgtcaccagtttgctcttggtataaccaacagccaacacctgctccgggttgaaatcctgaatgttatagatatacttggcatgcttcacccacttgccccaaacacccagcagtcctccaagaataggcggttgtgagatagaaaaaatatagtccatcttgccaaccttaaaagttgcacccattgctccaaagaaataagaaacaatattctttacacggctctttttattggtcttgctgaactccggcactcggattcgcagaacctttacaccattgatttcttcttcgtaatatttccgtgtcttatatttatcctcaatcgtccctaagtaactcggcaccacgcagatgactgttatgtcgaatttatccagcataccctccgccaattcacggaggatctgccccgttgacgcagtatctggaatatagtaatgagcgtagatcagaagatttttcttttttaacattcctctatattcctctcgaatattatctataaacaattttctctatatagctatacgtttaattatctcaaaaagaaaaaacatccaacttgattcattccaaagtctctcgtctttcctctcttttttctccttctagctatacgttcaatactgataacacctgcagttttcccgcccggttccactgcagatcatcattcattctacttcatctcttccatccaatccatcacttggatccgctgcccttaagcacgactccgacggtcttgaacagaatcttaatatccattccgatatcccagttcttgacatattccatatcaagttttacaacttcctcaaagtcagtgatatcacttcttccgctcacctgccacattccggtcagtcccggtttcacggcaagtcttccgcggtgatatggctcatactgtttccactcatctactgttggtggacgagttcctacgagactcatatctcctttaagtacattccagaactgcggaaattcatccaaagatgttttacggataaaccagccaagtccgtgcttgcttccatccgctccgcttccgatgattcttgggtcattctccatcttgaacataagacccttcatctcgttctgtttcatcagttctttcttacgttcctctgcatccatatacatgcttctgaatttgtaaatcttgaatcttttaccattttttccaactctcatctgtgaaaagaaaattggtcccggtgaagcaatatagattgccggagccaggaatattgtgataatacacgtcagtatcatccctacgattccaccacagatgtcaattaatctcttcatccctgcctgtcgcgcggtgatgattctaatacttgaagtaagaactgtatatcctcccatacggttgataaactgattctttgaccatccacttctcagatccagacattcgtggactgttattcccatatttgaacaagtttcaaataactcttctggtatcaatgttttcttcttaattccaacaagaatggaatctatccatcttgtctgtatataatcagttaatgtatcaatcttacttacaaccggaattcctgcaaaagattcattctctttcggttcacgatctgcaaatacaataccgacaatttcaaattcattaaacgcgttctgttccacgcgtttcaacatatactcaatttcactacttgttgtaacaagcagcatattcattttcacataaagcagacgaccatgctttaataaatatcgcttccatatgattcgtactgcataaacaaaaacaactgataatggaataaatgacgtgatcataagacgtgatgtcttatcgccctgtttgctcatgaacaaatacataatcacaagcgcactcacaaaaaatacatgctttaacacattcttaaactctacaaaatatcctcttctcatgataccacggtaaggctctgtaaagaaagctgtacaaatatctgttaacgcaataataattccaatattcagatataaactgttcttatatagatttcctgctcccatgcgtaatgcataactacttatataagctaactgtaatgctacaagatccagaacaataaagtccaaatgcttcagccagctgtcaccactttttctgtacattcacgcacatccttttcctctgatattttactgaactcattccatcaactataaaatcactacaactactaataaatcatttgaacatatgcagtgaaatcatcttctaccacatatgttcaaaatcagagataatcaaattatctttcttttctgtaagctactgcagaaactcctgcaagtattacagctgctccgaagaataccatccatgtagacggtacacctgtcttcggggatgttccgactgtagaatcagcagctttagaagcatcaaccttagcaataattgctacaggtgaaagatcttcaaatacagctgtaattgtcttaccctcataatctacacttgtaggtgtgattaattcaaacagatttcttactgtactgtagtggagaatctgaacatcagtcattgcttttgtaagggatggtacagaaattgtaactacatactttccttcttcattcttgattccaccgttcactggtttcaaatcaaaaaatggagaagccatttctttcccagctaactgatctgtcagttctggagttgttttaccaacgacatctgtcaatgactttgttccgctgttcactgcaagaagatcattaatgatctcttcgttcttcacatcagaaaaagactctgaagatgcagctgtaataatataactagatgcacttgaaccagttacgcttggtaatgctgtcttactcggagctaaaggtgctgcaaatgcggcaaccgcctgagtaacgatcagagctgcagcaaggatagttccaaaaattcttttcttcatgtttcccactcttcctttcttaaaattatttttctatagaaaccagtacagcctgcacgagaaaacgcttgtctgactgattgccatagcatgttgatagtgtgatgatcttgtcatcaactgacacattctgtgacgtgtcaatcttggcactcatatcacggatagcaaaaatgctgtcgagataagcctggtaaacagactttatattaaaatcaaaactctgcataaggtgcctgtcatcatacagatatgctgcgaaaacctggtaatgccgaattgcgtccggcgtatatattataacatctttatggttatcaaaaaagtctttatcctgataactcaaaaggttctgaaacatagagccatttttcatgtcatgcccgtaaatcaccgtattcggatcttcaaaatctttgctgttataatcttcggtaaatatggaaccttctgtcttcttctctccgtcgatcgtatggtccaggtaatatccgttatctccttctctttgaaggattggataatcaatgtttgtgtcttgaatctgaatccatgcatatacttccggattctgttcctgcagtgccgcaaaatcaattgggatttcaacaggtgccttctcttctaccggtgcaggttcggtctctttctttaccgtctcccgcacttcttcgtaattatcaccggcatgcttctcctgataatacttgtagccacctacagccgcacatgcaactgcagccactccggctataattgcgattatcttgtaaatatttttcttcacaagtactgcacctctttcaccacagcattttatgattgctgaattcttctgttcctcttcctgtattctgcactgattaattcggatcagaaactttcttatagaatgtttcaatcatcttttcatacagtgcattgtcatcgacatgatattcatcatggtcttctccttcaacagcttctcccggtactgtccagtctgtatcttctttcccttctgtcatactttgagtgatcttcaacagttgatctttgctgatatttgtcaccatatatggctctaagtccgaatacatcttcactgtataaccggaatcttccgcgatttttttcttcgcagcttcttcgaatgctttgataaatacctgctgacgttccattcttgcaatggcactctgatgaacattgatgtctctataacgtacaaatatctctgtatttgttccgtccagtgttacctgactgccattcttaaactcgggatacttttcttccaagctatcgttaggtacagtgactgtaacaccaccgacactgtcactcaaaatggacaatgcatccagattgattgcacaatatccctggatattcaatccataaaagagagtagacactgcttctttcgctaattctccactcttgtaacttccgtcaccatatgcatacgccagactgatatgatcctgactttttccaaggctctcaccgcccggtccatatgcttcaacttctgtgatcgtatctctggggattgaaattgtagtaattgtattctcttttctgtcccaggacagaagatacagcgcatctgattgtcctgcatctgcatgacctacatttgtctctattttctctcttgtatcaattccgagaaaaaggaaattactcagatgatcgttataccgatacttctcgcctttccaggtaattgtatccgtaagagaatcctcctctactgaatcctgccctgccgtatctttgtcagtcttcttagtatctgaaaccggtgttgtcatcttcgcagctagcattcctccagctacgccgatcaccaacaatccacagaatcctatgatccattgtttcttctgattcttatttttctttccaaacattgtctattgattcctactctttacttccgtagtaataataagaattatatctattatagtacttttccttcttcatatcgaccttattcagtacagcaccaagcagcttacatccactcttctttaattgatctttcgctctcaatgcatcttttctgctgactgcttcattctgaataacaagaattgctccgtcacactgctttgcgacaattgatgcatcactcatactgagcatcggaggtgtatcgatcaagacatagtcatatccttttcttgtctcctcgatcaatttactgaaaagctcctgctccagaagctcagatgggttcggcgcatacggaccggcaaagataaaatctacattagaataattcgtggaatatagaatcttttctttattcacctgtccactcagatactgtgaaagtccatcaactttctgttcaacctgaaaacgcttaacatagtttgatttacggatatccgcatctataatcagaactttctttcccatcttgccaatctctactgcaagctgaaaagtcacatcactctttccctcattcggataacagcttgtgataacaatactcttcgtttccacaccgctgaactgcatatttgtacggagggtcttaatagcctcttcatagaagacgtcttcttttctggaatctgtcatcagaactctctgaattgccatttatttttttctccttttactcttctttttctttgctgattttctggaattacgtggcccttttcctgtgataaagtcttttctatctgggatcgttgccagtgttgtcagaccaagatatttctcaatatcatcctctgatttgattgtatcatccatcagtgtgagtagaatgataacacctgctgaaagtacaaagcctgctaatgctccaaccatcacattcttctttgtatttggacttgtcttgactgttggaacttcaccttcttcaataatctttggcggtgtcacttccatcttatctccgataaagtcagatgatgtcttcgccagtgtatcagcaatcttttttgccatctccgggtctgtacttgttgctgtgattgaaaggattcgtgtgtccgttggattatctactgtgatacatcctttcaaagctttgtaatccatatcaaggttcagctcatctacaacatcctgcaataccgtacggcttgtgatcagaatattgtagtcttttgttaactggctgccaatctgaagatctgccagtgaggaaagtgttgtctcctttgtcagaaccagcattgtagaagttgcactgtaaactggtgtgataaagatctttgtagccgcaccggcaatcactgctccgaccagtaatgctgcaagaataatcagaatgtgcttcttcaatgcatagaacagttctctgaggtcaatctctacctcgtcatcatcatgtgtttttcccatcattactcccctttatcttattagtttgttttctgtaatgcgaagcgcattatcttttgttatcttcttaagatattttctgtccaaatgtgtccgcatccaactcatcgcctcttttgtatccggcatccggttcccggtattgtgcatatccgttcccatcaaatggacattgcctttcttcagattatctctgcaccaacgtgctgttacatcatgccagctgccgccgacagatctgtagttcatctgaatcaatgcgtctaacccgatcagttcttctaatcgtttcccttttctgagacatcgatacctttctgcatgtgcaatcactgggacatatctcgtccttgacaaattctgtactgcagtacagatctcggaataaggtaccgctggcataaactcgatcaacacgtaattgctgtctgccaatgtaagcaatttgtcttcttcaagcagacggatcacactattcgagtagaaaatctcctgtcctgtccaaatctgaatttgttgtctatgcttcacctttccatccggacctttcaccgggcggttggcacgacgcatcagttcatcccggagttgtctcagcttctccggatttttatttggaaatgccctggaataatgtgaagtagcaaatacatctgtaatcccctgtcttcttgctatggagagcatctgaagactttccttcatagaagccgacccatcatcaacccccggcaagatatggctatgtacatcaatcatttttcgtcaatcctttaaaaaataaaagagacactataatcgaactctattgtgcccccttacatcatttctttttcactttccaccgtgaatagaatattttattttttttatactgtcaagtactttttttatgcattttgataagctctgtatttttctggttaaaatttgtttattttttcattttgggttcaaaaatcagtgaagccaaatatccaaagataagtgctgcgctgattccggcagcacttgccttgaaccctcccaggaagattccgaggaatccatttttatcaacagcttccttcacacctttccacaggacatttccgaatcccagaagtggaacgcttgcgcctgctcctgcaaattttacaaatggttcgtatgctccaataaatccaagcactgcgcctgtgcagacgagtaataccataacacgtcccggcatcagctttgttctgtccagaagaatctgcactgcagcgcagatgagacctccgattaaaaatgcttttatataatccatttttctattccttttctttttttaacacacacttagcacattttttacttcttcctattataatagggcttttcaacaatgttcgatcataattgcatgcgcaattccaggcacacttgctccttcattgaagctgactgttgacatcaatgcaccggtcggcacgaagagtatctttctccattctccattctcaagctttggcagaatatatgaagccagtgttgatgccgcgcatccacagccgcttcctccggcatgtgtatcctgtgtctcctggtcaaagattgtcattccacaatccatatgcttttttctgatatcatatcctctgcttttcattaggtcaaaaagtatggactgaccaatatatccaagatcacctgttatgatctgatcgtaatcctcctgggttcgtccaagatcctgaaaattgcggtaaatggtatcggttgcagccggagccatacatgcccccatgttctgcgaatccttcaagccaaagtccacgatcttccctatcgtaacgccggtgatccgaatatgccggaactgggattttctttgacgttgcttatcggaatgtattttattcagacggcttcctacaaggaaagccccgctggctgtcacggtccagtgtgcggaaagtggtctctggttcgcatatcctaacggaaatcgaaattctttctctgcacttccgaaatggctggatgttactgccagcatgtaatctccgtatcctgctgccacactcattgctgctaatgccagtgcttctcctgatgtggaacatgcgccatacaagccgaatatgggaatctgcagatcttcaacacccatagaagttgcaatcccttgtctgagaagatctcctccaaagagataacgcacagacttcggatccacatgtgactttccaagtgccagtacacaggcttccttctgcatgttgctttcggcttcctcccaggtctctgctccaaacagatcatcctcatttgtcagatcgaagtattttccaagcggcccctgcgcttctttgcttccggcaacagatgctgcgcttagaagataaggtgcttttgtgaatacaatgctctgtgctccacgaagctgggacagatgaaaaggaccacactctgattcaactgcccggtttttgtttcccgtatcattcatatcatttcctcatttctgatgtttcattatttatttttaaggatattattttcatttttgtgaaaaactatgtgtagaatttaaaaacaaaaagaagggattttcatttatggacaaaatagaacaattgaagcaacagaagcaatacgaagcctatgtcaaaaagaaaacaccacagcacaatgtgtggtttaacatgatgaaggcgttcttccttggtggaacgatctgcctaatcggacaatgtatttatcatttctgtgaattgaaaaaactttccccggatgactgcagcagctggacttctattctgctcattctcctgagtatccttctcaccggtaccggaatttatccactacttgccaaatggggcggtgccggtgcacttgttccgattaccggctttgccaactctgttgctgcacctgcaattgaatataagaaggaggggcaggtttttggtattggctgtaagatcttcacgattgccgggcctgtgatcttgtatggaattgtgacaagttgggcgcttggagttgtatattgggtatggacgttgatgtgaaacaagaaatgtgttagataaatgtattaggaagccgctattcacggcttcctaatctttctttaaaatctgtataatcaaatacggttagctgctgcatggttctgtcagcatgtctgatccagatatccggcaatggcatcccgttaaatgtattgtttttgcaagtcgtataaatcgccatatctccaaacagaagaagatctccgtattccggtaatttgctgaatttatagtctccgatcacatcccctgacaggcaggttggacctcctaaccggactgtaatcccgctatctgttgtctcatccgatgctcccagaagcggtgggcgataaggcatttccagtacatccggcatatggcaggcggcactggcatctacgattgcaatctgtgtgtctccatttttcagaacatccagcacactggtcagaagaaatcctgcattcaatgcccaggcttctcccggctccagataaacctcaaccttccattcttcctgtgctattcgaatgcattgctccagtcgctcaatatcatatcctggtcttgtaatatgatgaccaccgccaaaattgatccatttcactttggcaatcaaatcgccgaactgtttctttacggaagcaagggttgtctccagatcatctgaatcctgctcacagagggtatggaaatgaaccccatctaaaagttccatcaactccggattcttcacaatagcttcatcccactgtactcttgttgtacccatgcggcttcccggtgcacaagggtcataaatctcatgtccctcctgggtagagcattccggattgatcctgagtcccacgctttttcctgcctctttcgccattcttccaaagcgaagaagctgggacggagaattaaatacaatatgatcggcatactgaagaagttcctcgaattcatccacccggtaacctgcacagaatacatgaacttcttttccagtcatttcctctgcccctagtcttgcctcatacaatccactggcctctgtacccgccagatacggttcaaaaaaaggataacaatcataattactgaatgctttctgtgccagaagcatcttacatcctgtccgttctgctacttcaccgagcagttttgcgttttctataagtgctttttcatccagtatatagcaaggtgttttgatgttctgaaattccggcggaataattccgccggtggctgtaaatggtgctcttttatctaatcttttcatcagtctaccaacttcggatcatgattttcactgcgcggcagaccataacggtcaagtgcatccaggaacggatccggatcaaattcttctacagtatatacacccggtctgatccattttccagtcagcatcatcaatgctccgcacattgccggaacacctgttgtataactgattgcctggcttccaacctcatggtagcattcctgatgatcgcatacgttatagatatagtaagtcttctcttttccatcttttacaccggtaaaaatacagccgatatttgtttttccttttgtgcgtggaccaagacttgccggatccggaagaagttctttcaggaactggatcggaacgatttcctgtccattgtactggatcggtgttgtagaaagcattcctacatcttcaagacaacgcatatgatccagatagctttgtccaaaagtcataaagaaacgaatacgtttcacacctggaattgtttttgcaagagactctatttcctcatggtgaagcagatacatgtccttgtctccgacctgatcaaagttgtattctctcttaatatccattggcgggatttctacccaatgtccgttttcccagtaacttcccggtgcacttacttcacgaagattgatttccggattaaagtttgtcgcaaatgcatagccatgatcaccgccattgcaatccagaatgtcaatggtatcaatctgatcaaattcatgttttaatgcatatgcacaatatgcctgtgtgacacccgggtcaaatccgcatccaagcagtgctgtaagacctgcatcttcaaattttttgcggtatgcccactgccaggaataatcaaaatatgctgaaaatccttcttctttacagcgtttttcgtaaattgcacgccacttcggatcatccgtatcttccggctcgtagtttgctgtatccatatagtttacgccacatgccaggcatgcatccataatcgtcagatcctgatatggaagcgcaatgttcattaccagatccggtttgtaatcattgatcagttcgatcagctgatccacatcgtctgcatcaaccttggctgtcgtaagaactgtttttgtctttcctttcagcttttctgcaagtgcatcacatttttcctttgtacggcttgcgatacaaagttctgtgaagacctcatctgcctgacaacatttctgaattgctacactggctactcctccgcagccgattacaagtactctgctcataactcttctccttttcttcaacagttgtatatttataattgctctcttataagttgccggtttattttgcaattgcaagaagcagttcacgaagaaccttacatgctgttgcggttgagacaccacttgcatccagcataggagcaagttcattcacatccgctcctactacatttgcctgtgcaactgtacggatggcttcaagaagctctaagaaagttactccccccgcctccggagtccctgttcccggaaatactgccggatccagacaatccagatcaattgtaaaataaattggtacatttttctctttcagttctcttacagtctcttccagtccgtcaaaagaaagtggatggaaatctgtatgctgcgcggcaaatctaaattcttctctctctccgcttcggatacagaactgatgaatacgtccgtctcccagaagatcatggcatcttcgcagaacgcatgcatgactcaatctggctcccagataatcatcccttaaatctgcatgtgcatcaaaatggatgatatgtagatccggatatttcgcagctacagcgcgtactgctgccagcgtcaccagatgttctccccccagaagcaatggaaatttatctgatttcaatatttcttctgctctcttttgaatatccgaaagcgccatttcactgcttccaaagcaaagttccagatccccactgtcaaatacactgatatccataaggtctctgtcctgatatggactgtaagtttcaagtccgaaactctcatgacgcatagctgccggaccgaatcttgcgcccggacgaaaacttgtcgtcgaatcaaacggcgcaccataaaggacaatcgatgcttcctcaaagctgctttcgcatccgataaaagtttctatattcggtaaaatcatgaattattcctccacttctttcagcatgtcttccagaaatgccggaaggtaaaatgctcctttatggagtcttgttgtatagtaacgtgtacgaagatttaatgcattccatgcttctgcgtccagatcatctacgggatgatattttttgctggcaaatccaaacaaccagtaacctgcggcaaaggttgggatatgtgcctgataaacacgactgatctgaaatgtactggcaattcttttatggcttcgctgcattgcatgtgcatcttctgcgtagaatggacttccctgctggttgaccataattccatcctctttcagcgcattgtaacaattcccataaaattcgcgggtaaacaatccttccgatgggccaaacggatcagaagaatctacgataatgagatcatatttcgcctcgcatcttcggataaaacggagtgcattttcgtaatgaagatgtactcttctgtcatccagtctgcatgcattttccggaaggtatgcacgacatgcctcgacaaccatcggatccatttctaccagatcaatgtgcctgaccctgtcgtatctggtcagttcacgaacgacaccgccatctccggctccaatcaccataatctcttttgcttctttatggatcgccatcggcacatgcgtgatcatctcatcataaataaattcgtcacgctccgtcagcattacatttccgtccagagtcagaacacggccaaattccggtgtctcaaaaatatcaattctctgataatcactctgtctggaaaagagctgacgatttacccggatactgtgtttcacatccggtgtatggaattctgaaaaccacatttccattgttattacctccctgtcagaacattcagtttcaaaatatccggatcttccggtccggtcatattacaccccttcgcttttgcatactcgatataatccagaatttctgctgtaatgcgttctccaggcgcaaggatcggaattccaggcggataacacatcacaaattcactacagaccataccttctgtttccctgagtggcagactgcacttatctgcataaaaagcatcctgtgggctggtcactacctgaggatcaatatattcctgactcagaagtcctgttccgtctgtctgaaaacgtctgcggatctctgcaagtgcactcacaagccgttctacttcctgtgcgcggtctccgatcgaaaggtaggcaagaatatttccgatatctccaaattcgatctgaatgtcgtattcgtcacgcagaatatcataaacttcaattcctgcgagtccgatatctaacgtatgtacacttaattttgtaatatcaaaatcaaaaacagaatttccatttaccagttcttttccaaatgcataataaccaccgattgcattgatttcttctctggcatattccgccatatctgctacctgatggaaaatctgacggccacgctgtgcaagattccttcttgaaatgtcaagactcgacatcagaagatagcttcctgatgttgtctgtgtcagattgatgatctgccgcacatacccggcatgtacgtccggacctgtaagaagcagactcgactgtgtaagactgcctccgcttttgtgcatagatacagacgccatgtctgcacctgcctccatagctgaaacaggaagtccgccaccgaaataaaaatgtgttccatgcgcttcgtctaccagacacatcattcctgcctcatgtgccatcttgacaattgctcgcagatcactgcatattccatagtaagtcggattatttactaacactgcgactgcctttggatgctcttttatcgcttttgctacctgttctctctgcattcccaaggaaatcccaagccgctggtctacctccggatttacataaacagggatcgcaccacataaaacaagtgcattcaacacactcctgtgaacattacgtggcaatatgatctcatctccacgtttgcaggcagtcagaaccattgtctgtacagaacttgtcgtaccccctaccattaaaaatgcatgtgctgctccaaaggcatctgctgccagttcttctgcttcccgtattacagataccggatggcagagattgtccagtggtttcatactgttgacatcgacgcctacacatttttgtccgagaaattctgtcaactccggatttcctcttccccgtttatgaccagggacatcaaatggcacaactctcattcgccggaaagtctccagagcctcatggatcggtgcatgattctggtttaatttaaaacgactccctttcatatttcctctctttccaggttcctttgtcaaaacactttcttaatacagaaaaaacgcagataagggcgctaagccacaaacctgcgttcggtatatattcgtctgttttattctcagctgtaacagaaaaggcaatatcttctcttagatttttaaataaaacttctggatcatgcgtgtcagagtctatatagcaattatacttttactactcttattgaccgtttcacaagtctgcgcgtctggcgcataaggctatcaaagaaacctacttataaaattagagcttttcactcaatcaataaggcaaccaaagttaccataatcggcagtggacccggctgtccgtatggccttaacctcgctgggtggtccgaaacaattgctttgaaaagactctgtctgttactctgcatcttcgtctctcaaaatcgactatagcataacatgttaaaaaaacactgtcaagaatttctcccatctattcgttactttcttgtagcaattcttgtattaaattaaggttcgaatcagaatgttccagttctcttgaataacgatataccgtatctatcacatcatttatatctagcactttttcttgcttcatccactgtgccatcagaagttcatggatcaacagagtgctgacaacagccatctgtgctttcgcaaacgcttctccatcgtatactgcaccgcaaaaataggtactgatgaaatatacaaggagctgttcatattgtatttcatattccggcatttctttcgccatccaggcatgaaattcttgtatcatctcaacataccgttttttgtctattttttcatttacatttctatataatagtttctctgcttcttgaagataagattcccaatccgctcttaaatgttccatctgatactgattttgaaacatcttcctactatatgtatagtaatccacttctgcaagagcatttttcacttcccgcacgccttcttcagcctgatagtaatcaaatacatcatccatcgagaatatatcttcttcgtcaatacattcctgcagattacgtgcaatcgccagaataagagctgctcgcagattcagctttttctctctgtcctgtaaaatctcaatcatcacatctcttgcatctaacagtttcgaatataaaaacggatcaaaatcttcataatcttcttcctcatctgtttcataagtaagaaaatgtaccggttcttttttattcatcaggattctcgccacttccggacaggatacagaaagtgtaacctcccgcacatcttcaaattcttcgatatgtcttggatacaatttacaggttctgcacaggctctcttctcccagtgcggtatacatatcacagaggtttgattgattcaggaaagcacatcttctttctttatcctgcttgaatgttccttcttcccagttgacagattctttcaaacgctctacaaatgtacctgtctcatttttatatttctctaatgaagcttcatctgcaacgatctgccatccagcacaacaagtgtcctcacattttcctgcaacacaggtaaattcatgataataatccgggattgtatataacattgatctactttatccattcctttcgcttttctgatcgtctatagaatttccgacctgttttattatagcacgcacttttaagaaatggttataaaaaacgtatcaaactgactggatttcaattatcactatcgaatatccggtcgatttgatacgttttattattttcttagaaatttaattatttctttttctcatacaggaactcttctggaagtgttacattaaagtcatgtgccagttcgcggaagttctccggtgtgattgtctgaatctttcttggtgtcatagaaagaatcttcacaaggatctctgctgacttctctactgtatgcataagaccgaatgtaagatcgaagtcttctcctgaacagaacattccatgatgtgcccagatagcaacatcgtatttctccatcagttcagctgtcttctctgcgattgctcttccgcccggaaccatccagcctacaactccaactccgtccgggaatacgaccggacactctgttgctgactcccaaagttctcttgtaaatacctgatcatccaaaggaagaacgaatgtcagtgcgattgtatttgttgtatgtgcatggtagattacacgatgttttccgtttgtgattctcttcttcacttcatggttcatcagatgggttggaagctcacttgtcggtcttccaccttctaccagaccccaacggattctgtattttgttcctgtataatcaatctcgataattgcaagacatacttcaggatcaacgataatatttctgaaatactttccacttcctgttacaaggaagaattctcctgcaagtcccggaacttctgttccgatctctgtccattctcctgattcattcagacgtggtctgatcagctcaacctcttctggtttcagacgataacttaaattaccaccatttctctcatgccatccctgaaggaatccgtcatttgccattttaataaaatcctgtacaaacttcgcatctaaaatcttcatattattttactcctcctgtttttactcatttaccgcaatgttgttttgtgtggtttatttcttcttcgctattgttttcttgtggtttctatttgtattatagatagttttatgtggtttgtaaacacttttttcaaaaaaattgtacaatccgaaagacattaacataaatcaagcctatcatgctataattctgaactatatcaggaggtactataataaaattatgaaacgtagagcactaaaggcagcctttccacgaacaatccctattatgactgggttcatttttcttggaatggcttatggaatatatatgaatgcatctggtttttcttttatctacccatttttcatgagtatgttgattttcggcggatcactggagtttgtctgtgttgagatgctgcttagtccatttgcacctgttcaggtactgatcatggctgtgatgatccaggccagacatcttttctatggactttccatgttagataaattcaaaggacttggatggaagaagtattatctaattttcggaatgtgtgatgagaccttctccgtcaattacacctctgagattcccgaagatgtagaccgcggatggttctatttttttgttacattattgaaccagttctattgggttgcttccgcaacgattggtggaatcattggttctcttcttaaattcgacacatcaggaatcagttttgtcatgacagctatgttcgttgtaattttcctggatcagtggatgaaagaaaaaatccatgtttcttctatgattggaatcctggtttcgcttgtatgtctgatcctcttcggagcggattcctttatgattccgacaatgatactgattgtacttctactgacagtacttcgaaagtggctggaacaatgcgacaaacttaaagaaaaggaggagccgaccaaatgagtagcatgactttggcacaacagataattacaatcggaatgtgcatacttggaacaatggcaacgcgctatcttcctttctttatttttaaagaaaataaaaagacaccggaatatatccagtatcttggtaaatttcttccttctgctgttttcggaatgttagttatctattgtctgaaaaatgtagaagtactgcacggaactcatggaattccagaaggaatctccattcttgtcaccgcagtacttcatatatggaagaaaaatatgtttctatccattgcaggcggaactatctgttatatgttgatattatattttctataataatctctatagcaaaaaggtctgagaccacatgtgcttacacattagcggttgctgttctcacttcgtgcgaccagcaaccatttctaatctcataactcttctcataactcttacggcttgcatctgccacaaggctcatatccttctttaatcaaatccgacctacttcctgtatactcttctttgttctctgctttgatgtccttcacaccagaacaagttgatttatgaaacttttttgtattcctattcaatatataagtttcttttttggttgattttgatgttgttgacgaattggatacatttttatcagttacttcagcttctgttcctggagcccactcaccttccggcgttgcgagttcttccgtctgataactctctcctgtctcataattgatcacaacatatggctgtacattatatacgtatacgttaaatgttacccctgcgccatcatcttctacagacttcgcctccatctggactccggaagccaccaggtcatcgtcgctatagattggagtgacacgatacatcacatgattatccgtttctttgacataatctgccacctcatcctcgaatggaagcataccatctacattcatatagcgtgttcctgttatcagattgcgctcattcgcattctcaccggtcagctgaaacccaatcagatgacagcggttgtacagatatccaccgtcaattccatcatattccttattcacccagcctgttggcttcacactactgatgctttctcttttctgtgtcggcatcaaatcttcacctacacaggcttccgctgtctgacatcttcccagttcatctaacgggctgtattcttcgtaagaatctgccgtcagctcatcttctgtaaatgttggctcattatcattgatctccacgtagggctgtcctgtatactccggtacttcttccagcgtatcaacggattctatctgccctgtcgatgcgaatgtcgtttctgttgtcgtttgatttacacggtcagtgtcctgattgcctgatccttgtgatatctgcagtgatccacaggatgtcagaaacagacaaagagccgttatacatccacataatatggttttaaatttctttttgctcatattgcactcctttttcgaacatatgtactcgttaagtatacactattttttctaatataggaagcgctttgtgtggacaccagtaacaaaatgtcaatagttttttaatcacttttcaaaaaaggaaaaaaatagaacgtatagttaatttccatacgctctatctcacatttcatattaaatttttgaattctacaaatcgggatttataggaggtgaatctgcatgaaatgtccatattgtggtgatgaaatgattagaggatacctaatgagttcacgagacattacttttgcagttgataatctgacaaaagtttttcgtataaaaaaatcggacgatctggaattgagtaaaggttcaggaggaatccctcattgtgaagcttatcgttgtagtagttgtaagaagattttgattgattatgcaaatagataaatttgaatttgtggaggataactattgtggataaagcagttatttatatacatggaaaaggtggtaatgctgaagaagctattcattacaaaccgctctttagtaattgtgatgtgattggtctcgactatactgcacagtttccatgggaagcaaaagaagaatttccattactttttaattcaatttatagaaactacaagactgttgaagtaattgccaatagcattggagcgtattttgctatcaatgccttatcaaatcagcaaatagagaaagcatattttatttcgcccgttgtagatatggaaaggcttattgctgatatgatgatttgggcaaatgttacagaggatgaactcaaagagaaaaaagaaattcagacaacctttggagagactctttcatgggattatctttgctatgcaagagaaaatcctattatatgggaaatcccaacgcacattttgtatggtgaaaaagataatcttaccgcttatggaacgatacttgaatttgcacagagaacgaattcaacactttctattatgaaaaatggagagcattggtttcatacggatgaacaaatgaaatttcttgatgaatggataataaaatcttccaaataaatttccagttgatatttcacatattttaggaaatttaataactgttatatttaattatcaaattcttcgcaaacccttgaaaatactaagtttgtagcaagtgagctttcccttactctttcccttgtgttatattctcacattggttttcatgaaccttaatatgggaaaaaataagggaaagaaaatttcataacacagtataacaataacgacatggtgaactgattgaaatgttttcgatatttaactctataactgattattaaaagaaaatggagataagatacgatgagaacaatttatgcagaatacaacataaatcacgatagtattgatgtttacacaagtgccggatatatgcttcgcattgattgctggaaagctgaaaaaaatctaaaaaccacatacggatcagaatgtgcgcttacttcattggctgtggatgagcctttggaatatgcaagattatatcttgagggtaatttacagatgtgggtagatgcagaagactcactagagttataatccttatccatataaataatatgcaaatatatatcccatcaatatagcgaatatactgaaataaaagtatctttataatcaattttaaccaaaagaatatgttcttagaggaggtgtctcccgaaagaacatattcttctattatgggtaattataaatatagaacatgcttttcttgtgctacaatttcttcactatgagttacaacaataactgtttttccctgttcacttaactcatgcaatatattcataacaatctcactattttttttgtctaaggaaccagttggttcgtctgctaatacaatcgaacatttctttagcattaaacgagctaacgcaactctctgctgttcgccaccagataattgatagacttttttgttaattactttctgtaaaccaactttttcaagagcttcatttattgaaatatccgttctacctgatttttttattatttctagattttcttttactgttttgttttccaaaagggcaaaattttgaaataaaaatccaacaacttctttgaaatatttctgcttttttcctttttttgccacatcaaaaccattcacaataatagaacctttgtcaggagtttcaatacctccaatcatattaagtaaagtactttttccgcatccactttcgccactaattaccaaaaaacggctatctggaatttccaaatgaaaatttttgaacaaaattttatcattatatgctttgcatagattttcaattgttatcataagcaacctccttttaatgatttcggtatgtttgttttttcaacaattgtgatattaaagaaaataattgtaaattctattagtgccataaatgaactaacaagaatgctaattcctacttcagtctgtaccgataataaagaatagataagcatacctactaatatcacaaaattttccactacaatcattttaagaagtgttttgtgccgttcaaataaactatatccaaagattttcatcaaggaaattttcattgcattttctcggaactctagtctacttactgtaacaataatcataatatttaaaagcaatacaatcgtacaaagagaacttaaaaatcccacgagttttattaaaaatgtgtgattatataaatactgttcatgtacgtttgtaattactagctgataatttccaagcatatcttcatactttttgctgatatttcttagctgtttttcatcacattgaaataaaactgctcctgctttatagctttcaagatacccaccattgactgctaaatctttgtttgcctgataaataattatcggatttttgcttttttcgataccatttattctacttgtatctaaataggaaaagtattctgtttcgctatactctatgtactgaatatttaattgttgtaaattatcatgatttaaaacatggctcaaggagtcataggctaattgcttgtttttagcaaaatatctattctttggaatgaaaataatcaaatcagaagattcattctctactgcatttatctgcttcgtaaaaccttgtaacatatcttttgcatgattatttacatatatcacatcatttttatcatttaaaatattcaagcatattacaggctttaatgtgttatattcattcttgtatagtttattccaaaaagcttcttctttttcagcattaaaatcagtagtctttacggtaaaataatttgcatcataatattcttctaacaaatgttcatttgtaaataggttattatgaatactactaatattagtggtaattgtaaaaacagcggctacccctgctataaattttaacgaataaattaaaaaatccactcctcttttgtgtgttgcatttgcgaatgcctttctaatatcaaaaaagcaaaaagaacaatatggaatagtggaaagaataattccaatggaatataaaattgtgacgagtctattctcatatgctcccgatatataatttgacagcaatatttttgcaacaataaataatgcaatgtcaaaagttacatcgaataaagcagccttaaatgctatgaaaccagcactttctcctaaggaaactcgtacaacaacctctttttttcgcctaaccacttcaattacatttagaacaatcatcaatgcaataatcataccccatataataaaaatcatgtccttttccgtagaattccaatattctggataagttaagctatatttttctgataatttctgatatgcagagataatattgtcctcatttcctatgtatgagataaagttttcataacccacagaggtactttgcaattctgagagattatgaaattttactttcgtaattccggaaactaaagcggtatattctgattcttctatgtttgcagtattttttaatgtttgtctgattactttatcatcgccataaatatgaagtgttgaaaggtatttattattgatttcattgtactgagaaaaaatatgtacatcattctccgttgcagtttctgatacatctttcagaaactgcgacatatcttcactagcaacttcatagcgtgatgacgtaaaatatgctgtagaaaagttccaaagctgatcttgaaatatttcagattgcataagtattccaaaaatcaggaaacaaaacaaacataagtttttaattgctttcatttatttcaaccccagattccatactttatttgctttttcaaatatcgtagtcaatattgtgctattttcatcaacaatccattgatcttcttgatcttcagcttttttgctacttgacaacataatttgagtattcaaatccttatagtcattaaatagcacgccttgacttattccttggtgaaatggttttatccaaataattagtgcatatcgaacatctgactcagctatcgcaagatttccattccaaagcaaataatcagggacagacacactatactggaatccatctttatctgtgtaaatttttactccagattcttctatttcagggaagtctttctgaaattcgttatatggtttataactcccgaagtaccaaaataaattatagcaacagaacaaaataaccaaaacaattcctatatattttatttttttcttcatttatatacactccacaaaaaagagtggttggaattccaaccactcagccattatcccgaacctttgtttagtagctattaccgtaggtaatactatttcctttatgagcaacctcaattttagaccaattacctttaccaacatttgaacccgaaaaagaaccatttccattcttgacatatgcgtaatgatctttagttgaatgatatgcgtgtgcataatcttcattaatagcaagagtattataaccataagtcaaaacaccttttccgccatcagatgtagtgctcaattcccactttttatcaaatgtcttattcccgtttgtaacagaaaatgccattactggaattgatgaagaaattaacattgcactaatagctacccctacaatcactttctttgctcttataagttttacctcctttgatctgctgtatttctatttatattttatcaaatattttgtatctagtcaatcagtatcttgacttatatagcgtcgaattgtaagatatattccttgtaaaattaaccaaaagaacaacagatttattgataatgcttttttaattacttctccaaaataaatgatgacagccgcacttgtcagtatcatcagtagggtaataacatcccaacagtttttcttatataattctataacctttatttctatcagtattgccagtatccctgtccctgccacacatattccaacaaccaatatcatcaataaccaatatatgattccggctataatctcatttggaatttttgtgctgatttgtgccacagattgcccggcatcaatcgtccaaccgataaaagtttgtatgaatgatgctgcatcatggaagaatgatttgcaatcggaaaggaacacatctgactgtactgcctgaaaaagagtggttgtcagcgaataccatgcaagaaggaacaaggttgtttggaacattaccgtttttgctttatattgtcctgcaagttgctctttttgtgtttcgtatcttgcttttgcattctgataggctgtccggtcacaggcttcgcattttttatagagtaccggcttttctaccggtatctctacgattttctgatgtgtccgggcataatcccgttgttgtgttaagcatcgtattttatcttgacattcctctatcgtgacgtttgcgcttcgcagcttctctttctcgctccgcaatgctctgtctgccagcttcaagtcgttctttaatgcttgaatattcccggctctgttctctttgtttaatttctcgttcaaggtcagagattcgttgagctgcgtcttcagttccacgataagctggtctttctgttccaactcttcttgtatctcctcggtcaagagcagaagttcttccaactgttcggcgttctttaattctctggattcgttcatctatatcacgtcctttctctacctgctgttccagttcagcaattcggtgttctgtttcagtaataaactgttttcgctgttcagcttctgtgccaatatctgccattgctgattttcgttttccaaaagttctatcttcgttttctgttcttccatcttggaaagtagttcctcggtatttggcaaaatgttgagcagctcggataactcgttgtttaatttttgtaatttctgattctgttcctgcataagagagagttgagtgtcccggttctgcatttccagaatcatttctgccattaggttctgctgttcttcgatttgaccaatcatggattccattaagggtataatttcccggctttcttctaatgtcatttaatcgctccttccataatgataatgcacccgatactttcccaaaggtgtttagtatcttttgcaataacgtgttttgttgttttatgatttgattttccgctactttccacgagccttttatttcctgcccggcaaaaaacttttgttcaatctttcttgcgtcagctccttcatggatggtaggaatctggagttttccctgcttttcataagaacgatgatcaacttgattatgcaaaggcagatgttcattacatacctttgcccattcactccgccacagttcacaattttttggattgttccatccagtagcatcggtcagcacccgtttccattgcaggcggtttcttgctccaatcttctgaattccgttttcgtctaatacagggatacggattccatgacggtcagggtttttcttatcctgccaccagttcggatgggattcatcaatcacgatatttccgtttttatctctgacaaaatcccaatccttgacttctttctttccccaagaatgatccgggttaaaaggacgcatagttagaagcagatggacatgggggttgccatcccctttgtcgtggatactccaatcagcgcacattcctctatctacaaaagttttttggatatagtcggttgtatattgaatttgttcctgtctgctccattctttggggagggcaaattcaaatgacctgccaagttgggcatctgcatttttttcaatcttcaatacctcgttccataacctctgtttctgaaatgtgattttgaatttttttaaagcagcttctttatcttctgaccttttgtatcggacagatttttgaaagcgttttatattttcttctggtactatctgccattcaggaggtgcgttttcgcacatcatcagccgggtgttgaccacttcttttttagaagtgtaataactgattctccctgtttcctcgtttttcatcacatccccattgagatatgcggaagcggagataacagatttccctttacttcgtccgactattttgattgtgtaatgaaaaatcgccatgtctggattcctcctttctgacgtatccggcatagatttccggcaacattgctttcagttttagaaaaagcagcattgccggaacgccctctgcgtaagagtgccctgcgcatagcagcctgcatggaatgcgcctctctggcgaagagtgcctcctgcggcatgagcaggtctggctgaaagccccgccgacggaacgagcccggcaagcgtgagcgcagaccggttgccacttgtggcaaacttattgggacgacctctggttgtccataagtgcgcccttcatgaaaaagcaatgaagggaatgaaaaactcatcccctctgccattacacttcctccatatcggtattggtttctttctgcattgcttttgagaaaaatctcccattggcttcctgccttttcagaaaaacaatcagctttgggatgtcttcttcctcgataggcgcaccgagaacggattccaccgcaccgccaacctgacagagcctatgggttcgttttttactttcttcggctttctttcgtttcagaagttctttcttctgtgctgcatatcgttttgctttttcaaggctttcctgttccttcttttccatttcaagcattcgttcttcataactttttgttgattttgccatgattacattcccctttcttttacaaacataagttctcggttgcgtatcagaagaagcacatggtataatcttcttgcgtgtaggtatatcatggcttcggtctgatagaacctttggcggtttctttggaagccgcctttttaatttgccgcagttcttgttacggcttttacatttcctctatccctcaaatcacgaccttcattcgcttccataaacatttccagaatatcggttttaatcaggactttgcgaccaacctttaatactggaagtttcttccattctacaagctgtcttaaggtgtttctgccgattcccgtatagtcagcagcttcttcgatggataatgcaatttttctttgcgtcatataatcacctccttataaattgcattatgcaattcttgtgatgtaagtatatccttttcatatctttttgtcaagcgttacgaaatattaaaaataatttttaagttgcatattgcaattacagaaaaacaatgctataattcatacataccgaaaaaggaggcagtcagcatgaaagataaagaactacgcaagctgataggcagcagagtaaaacagcgccgtctggaattgaatctgacacagccttatgtcgcagaaaagatgggtgttaccgcttctacaatcctgcgttatgagaatggttcgattgacaatacgaaaaaaatggtgctggaaggtctttcggaagcactccatgtatctgtggaatggctcaaaggggaaacagatgaatatgaaaccgacattacggataagagagagttacagattcgtgatgcgatgggagatattctggaacagttaccgcttgcccttaccaaagaagaagatgctttttcaaaagatttattactgctgatgttaaaacaatatggtctgtttttggattccttccagttcgcctgcaaaaacttcaagggaaatgatggtcagacggatattgccaaaacaatagggtttgaatcgaatgatgaatataatgagattatgttcttaagggaaatcactcacaccatcaatgcttttaatgagatggcagacatcgtaaggctctattccaagaaaccaaaaacagcagagcaaaggcttgcaaatcttttatcagaagtcttatacgaagattccgaatcggtatagtaagacagccggagttatgatatacttacacgcacgaagcatttcatcagttccgattgtctaatatcgaaaggagacatacgattatggcaaaaggatctgtaagaaaaaaaggaaagaaatggtactaccgcttctatgtagaggacgcaagcggcaatcttgttcagaaagaatgcgttggaacagaaagcaaaagtgaaactgaaaaactgctccgtcaggcaatggatgattatgagaaaaagaaatttgttgccaaagcggaaaatctcacagtcggacaacttttggatgtgtgggcagaggaggaattaaaaacaggtacgctcagcaatggtactgtggagaattacctcggaacaatccgaaatattaagaaacatccgctggcagaacggaaattaaaaaatgtaacctctgagcatttgcaatccttttttgatttgctttccttcgggggagttcatcccgacggaaaagagagaaagggttacagcaaagattacatccattctttttccgcagtcatgcagcagtccttccgctttgcagtatttccaaaacagtatattacgtttaatcccatgcagtatattaaactgcggtatcagacggatgaagttgatttgttttcagacgaggacatggacggaaatatccaaccaatttcacgagaagattatgaaagattgcttgcttatctgaaaaaaaagaacccagccgcaatacttccaatccagatagcctattatgccgggcttcgtattggagaagcctgcggtttggcgtggcaggacgtaaatctggaagaacaatgccttaccataagacgtagcatccgatacgatggctcaaagcgcaaatatatcatcggaccaaccaagcggaaaaaagtgaggattgttgattttggagatacgctggtagagattttccgtaatgcccggaaagagcagttaaaaaatcgaatgcagtacggagaactttatcacacgaactactacaaagcggtcaaagagaaaaacagagtgtactatgaatattattgcttagacagaacagaggaagtcccggcagattataaagaaatttctttcgtctgtttaagaccggatggttgtctggaacttccaactactttggggactgtttgcagaaaggtggcaaaaacattagagggatttgaaggctttcatttccaccagttacgtcacacctatacaagcaaccttttagcaaatggagctgccccaaaagatgtgcaggaactgttaggacactcagatgtaagtaccacaatgaatgtctatgctcactccacaagagatgctaaacgaaaatcagttaggcttcttgataaagtggtaggcaatgattaaaaaaattcccttatttcccttgtgattatctcataagggtaaaaataagggaaactacatatcatttcactaatggacaggcgggaaagcctataaaatggggaaagttagagagataattatataaattccagtttgatgatgaggtgcttttcatgaaaaagagtatatcaaggattatcggtgtgataatgttaattatagctattgtatttataatgtttgcattgaaccatccagaaaagagtttcccttggaacaatacaattacttggttactgtatggtgtatattttcttgtgacaatagtgctgcttattgctccgaagatgaaaaagtgaaggcaaaacacagtgtctagacatcgtatcaatgcgaatccttttcttcaccgcaaaaaccaacaacaaaatgggtaaccagaacattaaccactaaaagtgatagcattattcctgcgataataagaatcggccaacggaatgtgaaatatgacaatttattttccatataaatctttaccccaaccaaagctgccattcctacagtaaataacaatcccaccacacacataaaataataacttccttctccaaagagcattaatttcatttgcttatcggtcattccaatacttttcattacgtcaaactcttttcgtcgagcgtacatcccagtgaatacaacgttacaataattggtcaatcccgtaatgaataatacgatacttacagcacctaagagaattcgatttcctcgcatatatgtttctttttgctgcatcaggtctgatttacagataacaaaaactcctgcttcgccggttccttcatccattgatacttctgtcatttcggatcgttttttattttcctcggagaccagctcgctgatctgtgttttcacataaggttctttttccggattggcagttaattccattgttaatatctttttctcagttggtatcttttgaaagcctttctcactgataaaatagtataagctgcattctccatgccaggattgatttatttccgggaaatcatcgttttgccgatccaaataaccacatagagtaaatgtttcagattctttttgagggaattcgtcttcctgttgtttctctttattctcagaattactttgttcttttctacgaatcgcatcttctcttgagagcaaagttttaaagtataccggttcgccaattgcttcatctgcaagtttttgctgttccggggtcagcatatgatcatgtatgatcagcacaccatttccttcttccaaagatttcaaatcaatattgagttgattatcctgaacgtatttcgcaagcgacaagatttgattgtcatttaaaatctgtaccgtatcccaactgaatccttccaccatattgtcatttgtaagattcgaaagcccttcatcataaggacggatgccctttctggacataactgtagttacataagctccttcgatcagattagaattctcccaatcgataccatctatcttgtgtaattttttctccaactcttgagagattggtgaaaattcatcataatcgttatcatacaacagttccacaccatctccctgcgtcagcaaaggatccacatcgatttctcttgttttatattcttccccacacccctggcttttcccaaattcgctaaactctcctgccagcaaaaaatcaggacgtttctcaagaagatgcttataatcacatccatttgtaagtacattcattagaacaaaggataggactcctaaaaatatagaaagacttgtaatgataaatcgtgctttctgtcgtgttatatttccccatgcaatataaagcatttctcctgtttcagaacgtctgtgcactattttcccagagtgttttgtttttctggcaactgtattttcgttataagcagcactctcaatacaagacagcttcgttatttttctaataacgccttccgatgctatccacaaaattccatttacaaatacaacagaaagcaaaagaatccacggtctgaaaaaggaaagtattgtattccctcccatttcctgataaaaatggaaacctaatagttccggtattaataagactaaaatcagtgcagagatcaaacttcccaagacagaaccttttaacatgagtgacctcatttgtttccggtatatttttgtaatctgtctttctgtggctccaattgtgtggagcagtccgagattttgaacatcttcgctcatggatatccaaaggacattgcgtacaaggaaatatattccacacaaaattcctattgttcctaatatcaccatctcatatccacctgcgaatttagaaacagcagtatattgtgctgtatcagaaacgtatatcttctgatctgcactcttcatcggcaatgtctgatataatttttcctctgttttactcctgtttaaatgatcactctgactgaaaagtaaagtataaggacccttttccagtttcaactctttaattttgtcatgtgaaatatatccgattgctaattcatttccagagtctgtataccagccacacaattcgaatttttcttttgaatgttcgaacacacctttgtatacatctaagtttatttccattccctgttccggttcagagataccaagttttttcaatgcccgctcagataatagaatttcatcctttttctgtgggtagcttccaatcacattggtatatgccggtctcaaaaaattgttccagctttctgagtcagcccagactatatcacatatcgtttttgcattgttctccgaaacttctgtagcttcacctacaaaaatactttttccaacttgttttatataatccagttgttttaattttgcatattgttcttctgttccatcttctattctccccgaagaagcagttccattttctctgattaatcttatttcttctgcctgtatttttccaaatgagattccgaataccatagtaatagcaacaataccgattacgatcgagcaaaataaaatcgtatttctcaccttttttgtgcctgcaaaatttttagccagaaatcggattatgtctttattgttattcggaatgttcttgtgaagcatagtaatccctcctaacaatcgttacaatctcttgtatagattttcccatcagacatacgtattactctgtctgccatctgtgcgacctcttcttgatgcgtcacgatcaatgtcgtctgatgaaatcttgcagcacaggattttagtaatcctacgacttccatacttgtaacagaatccagatttccggtcggttcatccgccaggacaattgccggtttcgtcaacaatgcccgtgctatagaaactctctgttgctgtccaccggacagtgttgatggaaaacgttctaatttatcttttaatccaagtatttctacaatttcattaaagaaatctatatcgatttccttaccgtcaagtcgcatcggaagaactatgttttcgcgtatactaagcgaaggaattaaattatattgctgaaatacaaatccgatatttcttcttctgaatattgttctttcttccttgttaagatcttttaaacttgtatttctgatccagacacctccaaaatccggaatgtcaagaccacctaatatgttcataagtgttgtctttccacatccggaggtaccaacaaccgctataaattcgccctcttccaccgttaatgacacaccatctaaggcacgcacttcatatgtatcggatgtataatatttttttagattcatggctttgattatatccatcttttctgtaaactcctttcgcaaatgctaccttcaactcagccataatctattttacatggtacatcttacaaacttcttacacgctgcatatgaactgtctataccggaagattcacttctataagcagccctggcttcatttgttttgctttcatcatccctttttgtaatagaacaatctctctggaaagatataaaccaattccgcatccttcctgccctcttgcctgctcaccacgataaaatctttgaaaaattttattttcttctccatctcttatcccgattccataatctcttacttgaattttataaaacatttctgtctgtttcattgtgatattgatcgtgctgttgcttttgctatatttgactgcattatcaaacacattataaagggcctcacacatccagtttttatcatgttcgcaaatgattttctctggcaattctacttgaaaatagatatctttctcttctgcctttttctgtatttgccccaacgcatttagaatcgtttcaacaagattttctttttgagtgtgaacttgtatgattccctgctctaatcgggcagtttttataaagctctccaccaaaaaacataattgttcttcacttgttcgcaagtcttttatgtattctgtattcaatgtttcttgagtttcatttaatgactcttgcagcaattctgtataattttttatattcgccagcggtgtccttagttgatgcgcaatctcagaaattaatttctgtatctcatatttacttttttcagcctctttccttcttccttccaatatttcctgtaaacggattaattgattggtcgttttagaatagattgtttctttccctatatcagaaccatctaattcattgccgtttattaaggattccgtcaatttatatattttattcatttcatttgttctcaaatgattttcaactaaatatacagtgcttcctccgagtatgaaacctattaaaagtactgtaaaaattgctacagccatgctactctcccattctatatcccattccaaatacattactgataacattcgatgaatcattcaatttctttttcaatctgctgatcataacgctaattgtgttaggatcaatgaattcactatcgattccccatatattttccattatcatctcttttgtaagaacctggttctggttcataataaaatattctaaaagctgatactctttgagtgtcaaagatatttccgtctctccaacaaaaacctgttttctatcggaatataacataacctgtccgcacataaaaatattttcatttgattttctctttagcacaacttcaatacgctttaacaatacttttattgaaaatggtttaaccacataatcatctgctcctgtatcaaacgcttttaacatatctttttcgtcatcttttgcagtcagaaaaatagctggaatttttctatttttttgaagctcctgatatagatttattccatctccatccggtaatccaatatctacgatcaacaaatctacagaactatctatatttttaattgcttcttttctcgaaccagcaagaattgttgtataaccttgatttttcaaggatgtatctaatgcctttctcaacaaattgtcatcttctataattcctattctcatacactcctccaactatgatacctacggattgtttcgtgcaatgcactcccacaatcctggtatcatcatataatataaaaatacacatatcttccttccaatacaagctttttacacaataatatgaaaggtgatattcagaaatcattcaaagcatcaccttcctctgttgaaatccgtaatactaattgtcataaatagaaaagagcgttataataaaaacaatttgaaatcaaagaaataagttggaatttctaaacacaaggagaaaaaaatgagtacaaaagttgaaaaagcattagaactacatggcaaaggatataactgtgcacaggctgtagcctgttctttctgtgaggaatttggtgtagaccaagaaacaatgtttaaaatctctgagggattcggatttggcatgggcatgatggacatgtgcggagctgtaaccggaatgatgatggttatcggaatggacaacagtattggaaatcttgaaaatggaaaatctactaaagcagatacctataagaaaacaaaagaatttgcagaaaaattccgccaaaagaacggaacctattattgtcgtgacctaaagggagtctctgaaaaggggaaagttgtcccatgttctcagtgtattgcagatgctgttgaactgacagaaatgtatttagagagtgtaaaataaagtgacgctaaataacaattgggagctatgctcccattatttatttctccctgatttcttgaggtctcctcatccacctatcttctcttccagttgtaacaatcgattgttcagtactgtataataagcgctttctctgttttcaaccaaaatcagagtaatattcgccgcaactgcaagatctaccagaaagctgtcttctgttcctgctgtttcctgactgagaatcagcttcttcccttcattctgttcttctaatattctttcaaacagttttgtaagaatcgtactctcgtctaccttaatttcttttatcttttctatctcaatttcttcttttctgaccaactgcggcatacttggatgtaccgcacgtacacctccaagatacctgtaaagcggaattttttctgcagccgctgctgcccgcgccactgcaagtgatattgcaaaggatgtctgttcatttccgttttctttcagaattgtatcaatctttctttgttcaaatacattttcaccgattatttccggtgcgatctgactgttaagcagttcaattttttcttcgatgtgcacctgctgtttttctgtctgctcttttttactataatttttccctgccatagacgcttttcctatgatttctcctcctgccagcacttccacttcaatggccggattcccggcgaaatcaaggatctctcttgcataaacgtcacggatttctattgcaagatccagcttatttctaacttctggttccacactccaaaacctccttttcgttgcttttctttctatttttgtatgctgtttttcgtactttgcttaatttcagtatttcctttttggaataacttcatgcgttgacttttcacttttcaacgcttacaatcatatgtgcaaacatttgtgacagatttttagattggatgttgcacacaaaagctatcatttttcttttggggaggaatttatttatgttagacaaggggaagcattttcttttactgacagtcagcacactgatcatggcgattggtacctactttttcaagttcacgaataactttaccttcggcggtatcaccggtcttgctgttcttattgcaaagacaggatttatgacagccggtgatttcaactttgttgccagtatgacgcttctggtgatcggaatgattgttcttggtaagaaattcgcagctaagacagcttattgcagtattctgctctcggtaacgctttcttttctggagcgcgtctgcccgatgaaagctcctttgacagaccagccgatgctggagctttgttttgcaatcgcacttcctgctcttggctctgccattttgttcaacattggaagttccagtggcggtacagatattattgctatgattttaaaaaaatattccagcttcaatatcggaccggctcttatgctttctgatctgttgatcactattgccggattctttatcttcgatatcaaaactggattatattctttgctcggacttacgattcgttctttcatggtagacacctttatcgagaacttcaatttgtccaaatattttaatgttgtatgtgacgacccggaaccgatctgtgatttcatcgttcatgagctgaaccgtagtgccagcgtctttcacgcaacgggtgcttattccggtcaggacaaagcgatcgtcctgactgcgctcaaccgtacccaggctgtccgcctgcgtaatttcatcaagattactgatccaaaggcgtttattctgatctctaatacaagtgagattatcggaaaaggattccacagtatctgatcaactctgtttgatcagatgttgtgagtggggcattctaatgaaataagtgatctccgatccgtgttccgtaaccgcctacactgaaatacagacaatctccaatcggattgcttcctgcaagtgcatcttctgccgcctgcatcgcagcttctgtatagccctggtttgctcttacgcggtcaagccatccggacattgccggtgagaactgaccggactggtagattacttcttccatcgtatccggataagaggaactcttgatacggttcattacaaccgctccaaccgcaacctgtccttcatacggttggtttcccgcttcacagaagatcagggatgccagcaattctttttctgctgcctgctgtgcagccgctgcttctgcctgtgccgctgctgccgcttctgcctccgccttctctctggcgatccgttctgcttcttccgccgcacgtctctcttcttccagctttgcttcataagcaatcttcgcttcaactgccgcgatcttcacattctcaatcatccctgactgcacatcgatcacttcctgtgatacacaccagtcagtacctacatccccggcagactgcgtgtcatctaaagtttcttcctgatccgatggctccgttgacacttctgcttctacagcactctgcccctgtgcttccgtggaacttgcaaatcccgtcagcatgaccgcactcatcattgctgtatacatcgccagaaacatccttttatttttattaaatttcatataccctcctaacaattttgttgcataatttttaccatttaattgctattctttattaatactatgcattattttcatttttattacatttattacaaaaatgttacgagcgatatattatcataaaaatgtgtgcatgtcaacttttttatttcatgcagaaaatccgatccttttttctactaaaatacagctcctgtaaaagtctcaacttcctacaagaactgtatctctcaacatcattttatctcattttttacaatgtcacgatttctccatcttcatcccagagatcatgccagtcttttgctccatgccacaagaacacctgtccttttacaaggcggtttcctttttcgagtgttgcgatcttcgccatctcttcttctgtcagcggatcttctgtcattgcttttaagttgcttacataattgtgaagtgagaacgggattgcaatctcgcctctctgtcttgcccatttcagtgcaatgatcgccgggtgacagttatgagccttcgcaatctcctgcataaccggagtctgcagatctgctacatcttccggacacatatccctctccggtctcatcggagaaccgattggcatgtaacctaccggctggatatcgtgtgctacgaggtaatcgtaaagttcctgttgctggaagcaaggatgaatctcgagctcacaggcaaccggtttgatcttcatcaatggaagtactgcttcgagtttcggaattgtcatattggagattccgatgaatcttgtcagtccgtcttcaacgagtttttcacactgtctgtatgtattcatgaattcttccacactgaatggtttagaatccggatttcttgactctacatcgcattttggtgcatggtaatttgggaatggccagtgaatataatacatatccacataatcacactggagatctgcgatacttttcttgcaagcttcttcgacatgttcgtgcatatcgttccatacttttgtcataataaagagatctttacgttctacgattccctcatcaaatgcatttttaaatactttaccgatctccggttcatttccgtagcatgcggcacaatcgaacatgcggtatccgcttttgattgctccgtctactgcttcagcaatctgatctgctgtaaatctgtcggaaccaaaggttcccattccgatacatggtgcttcatcacctgtgtagaattttacttttggcacatctgccggattaataaattcacccatgataattctccttttatctaatctaaccaatcttctcaatctccacctgtggatagatcttttccatatcttcttttacgaagaatcctgtttcttctctgagtgctgctgccgctgagatcgcacttgctttcttcaatgtctcttcaaccgaaagtccttcgctaagtccaagagcgaacccggcgatcatggaatctccgcatcctactgtgtttaccgcatcgatcttcggcacacgtgcgcgaaagattccgtcgtcacatacgacaaaggaaccatctccaccgagtgacactgctacgatttcgactccatctgcatgaatctgttttgccgcatctaccatgtcctgaaagttgtcgcagctttttcctgtcaacatacggatctcatcaatgtttggcttgatcatcgtcggctttgtctcgattcccatctcaagcagttttccacttgtatcaaggatgactttctttcctgcctctttgcagattcttacaagacgctgataagctgttccgtcaagtccttttggaacacttcctgacatagcaacaacatctgctttcttcaccagttctgtgaaatgtttttcgaatcccttaaattcttcctcagataccgtgaatcccggctcaagaaattctgtctgcacgtgattgacttcatcccagatgttgatacaggatcggctctcttcttccagatgatagaattcgctcttgattccaaatggtttcagtgcatcttcgatataatttcctgcatgacctccgacaaatcctgtcgcgaccacttccgctcctgcgatagacgccggcttggatacatttaatccttttccgcctggcgtgtacgcacattctttcacacggttgacttcaccgacctgatagccttccacaacatatcttttgtcgattgctgcatttaatgttactgtaagtatcatattcggtacagagctttgacacatcaaagctcttgtccccctctctgattaatcttcgtttacaagcattactttcccctgtacaagtcccggtgtcttaaacatctggaatgcttcctgtgcctggctcatcggaaccattttgtaaataaatcctttgtcgaatttcagctgtcctgttgcaaagtaatgtgctgtcaaatcccactccttgcctgggaacggtgcgctgtaggacatccaggatcctgtcagtttgaactctttacggttcatgttctcccacattgccggtgtgaactcaagattgacatgcggtgttccgataaagcatacatgggatttatttcctgcaagttcaaatgccatatgcatggttggaacctgtccggctgtctcgaatacaaatccgtatcctttgccgcctgtgattgccattgcctcttccataaaattctctttcgttgtgttgacaacttcgtcagctccaagacgtttcgcaagttcaagtctctcatcactgatgtcgaatactacaactttctttgatccgaagatcttgcaccactgcattgtaaacattccgattgttccgccgccgagtactgcaacatactgtccgccctgataatcattctggaatacaccgtggatagctacagtggcaggctcaaacatggccgcctgttcatacggaatgcttggatcatatacaactgcattttgctctgggatcactacatagtccgcattggatccctgctctctggaaccaataaagctgtaatgtttgcacagagagaaatttccgttctggcagtcatcacatttcatacatggtttcaacggtgcaccggatacgtgatctccaaccttaacctttgttacaccttcacctacttctacaacatctcctgagaactcatgtccaagtacgattggatagaaatgaactccgttatgaagtactcgtggaatatcagatccacagataccggaacattttactttgaccttaacttcgcccggtcccggtgtcggttcttcgtaatcaagatactgtacgtcttcgttggcgcatacaactgctgctttcattttcaagatcctccttttttgatcttttgttaatttatttcttattcatggtttttcgccatagtttcctttaattgtttataaagttctatatatgtttcgtaatttttatcgtaaacttttctgttttcattattcggttcgtgggaacgcttctcttcaatagtaagcttcactgcctcgtcaaagtctttgtacattccgattccgactccggcaagaatcactgcaccgagtgttgttgctgtgtcagaggatggaacaacaattggttttcctgtgatgtcagacttgatctgtgtccacaacaaggagtttgctgatccgcccatcgcacgcaggacttctactttcgctccggcttcttccgcaacatcaaggttatgcttcaatgcataggctgttccttccattgccgcacggatgaaatgtccttttgtcttactgaaatctaatccgtagtagacaccttttgcgtttggatcccagatcggagttctctcaccggacatatatgggaggaagatcactccgtcacttcccggtgctactgctgccgcctcttcattaaataaatccagtgagctttttccctgacgttttccttcttctctttcgtacgctccgaactcccgctcaagccagcgcatcactccgccgcctccggttgttccgccttgtaagagccagcaatccggcacgacatgaaatccaaggatcaaccgctcatcggcacgatactggtcggtacagatactcattccacctgcctgtccaccttgttcctgtgtctctccgctgtgaatcactcctgcgccgagagttccacatgctgcatcgagtcctccggccacaaccggtgttccttccgccagtccgctttctttcgcagctttctcatttacctcaccgatcacttcatgacaggcatgaatttccggcaatagctcagaagaaaatccaaattcctgacacatctcttcattccaggttcctgttctcatatcgaaacagtgaaggccatatccctgagaaagatcctgtgtcatcacaccggtcagtttgtatgcaatataactgttggattgaaggatcttataagtctttgcatagacttccggcagatttctctgataccagatgatctttgcagttgtataagatggctgcaaagagttgccgcaaagctcaaagatcttgtctttcccaatcttttcattgaattcttcacagatatctgtggctcttgtgtccatccagattggggtgttcgtaagtacatttccatctttatctactgcgatcgcagaccagctctgtccatcgattccgattcctttaatctcttccggggaaatatttccttttacgagtacccttgggattgcatcgcaaactgcttcccaccattcttccggattctgttctgcccatccaggatgtgggtaataaacctgataatcaccggttccggttgccttgacggttccgtcttttgcaaagactgcaatcttgcaggcactggttccgatatctattcctaataaatattctcccatggtctcctcctctttatgaaatgtccgccactgattctccttctacgaatccggttttcagccagattgtctctgttgtttctattttgtctgatgttttatctgatgtttcatccttatcttcgagatgactcaataacagatttgccgccgcttgtccaatctcttccgttggctgtgtcacgattgtcaatcttggtactacagctcttgcaaaatccatgttatcaaatcctatcacagacagctgttccggaactttgataccaaggtcattgatctccatcattgctccgactgtcatctcgtagttggagataaagactgctgtcatatccggattgtcttcgtaaagcttgcgcattgctttcgctccgccggcaatcgtgtagttaccatctgccagaagttttgtatctgttctatctgtttttccttttaaatctgattgttgtgctgatctagctttggatgattcttgtatcgcaagctcatatcctcgttgacgttcccttgctgtatacacattatccggtcctgtgatcataccaatcttcttatgcccttttttcatcagccgtttcactgcgttctgcgctgctccttcattgtctacaagaacgcagtcacaatctccgttctccatccttcggtcgatcagtacaaccggtcttccggattttctaaatctatcaaatactttcttctctgctccggttggcatcatgatcaagccatccactcttctgtgaagaaggaattctgctgcctcttcttctcgcttcacatcggatctgcagtcacagatcatcgtcgcatacccatgacttcttaataaatcttccgctgctgtaataatctctgaaaagaaaatgttgttcaactcgggtaagatgattccgatggtcttcgttcggtttgtctttaatcctcttgcaacttcatttacctcaaaatgaagcttctcaattgcctcttcgatcttgattctgtttttctcacgcacatttcctccatttagataagaagaaattgttgcaagtccgagccctgtctctcgggcaatgtctttcatcgttgcacccataaacttatttccttattctgtatcttgtaagctatcacttgttttattttgcttttccatcacatccgcacatcttcatgcgtgcgatcacctgttcttttacagcttccatcgcaacaacaccgagttttttcggatcgaatgtctccggcttctcttcaagcagtttcttcacggcatctgtgtatgcaacacgaagctcagtagcaaagttgactttacacattccacgctctacacattctcttacgtcttcttcactcagtccggaagctccatgaagcacgagcggaacatctacaacttctttgattgcgcttactcttggcttgtcaagaaccggggttcctacataaaagccgtgcgctgttccaatcgctactgcaagagaggaaactcctgtgcgctctacgaattctttcgcttcctgcggatctgtgttcgtatcaacatcagcctcaaggtcgtcttcctttccgccaactttaccaagttcagcttctaccggaataccaaatgcatttgctacatctacaaccttcttcgtcactgcgatattattctcaaaatcttcgtgggaaccgtcgatcataacagatgtgtaaccagctttcattgcctgaactgcaagttcaaagctattgccgtgatccagatgcagacataccgggatctttgttttcgcagcttctgctttcacgattcctgcaaatgtctccaatgttccgtactttacagtagaaggtgttgtctgaagcatcaccggtgcgttcagctcctccgctgcagcgatgactgctttaaccatctccatattctctacattaaatgcgcctactgcgtatccatccttctttgcgtctaaaagcatcttttctgatgtaactaatggcatcgtatcgtcctccttatttccaaaaccgaaacgtttcggttttgcttatgtacttattttagtacaggatttattgcttgtcaagataatgaaaacgaaaagtatatttttattaaagctgcaaataatgtaactgttcagagccaacctccaaaatgctacgcatttcgtcggtgtggcgtatccgccaaataaaatttcaaaaacagttttaaaaatgcaagcattttatacctgttttttgaaattttgcttggctctgaacagttaccaaataatagaaaaaacacttcaggaggtctgatgaaatgaaaaacagagcgaaaaagagatggtttgctttaataatccttttactatgcgcagttgttattggtctgttttattggaatggacagaagaaaatgcaaaatgatgagggatatcttgtgaaatattcgttactgttcgctcccgtgtcaatcactccgctgattgacacggaggatgcgcgttttgacttgaatgcatctcgccccatcgccaaaggcgatttaaaatggcgagatgcgttgctggtcgcacatcgtgtgaacagtaacaaatattctgctccggataagaaactggaggtgatcgtccatggcatctgaatcaacaactctttatctcaaagcagacaggaatgttgaggtatcaaagcaaaacgttatgttaggagatctcctgagtatggagtgttcagacaagaccatcctgatgaaagtaaaaactttgcggatcttgaagatccgggaggaaaaagaacagcgctatgtaatttccgtgttgaaaatcattgcctgtattcatgaacagtatccccggctggagattcagaatctgggcgaaacagatattatcgttacttatgaaaatcagaaaacaccacctcttctctggcacattttaaaggtagtgctggtatcagcagtgattttctttggatctgccttctcaatcatggcattcaataatgatgttggggtaacgaagctgtttggtcagatttatgaactgatcatgggaaagaagacagatggtttttctgttctggaagtcacgtattccatagggcttgcaatcggaattctaatattttttaatcactttggtaagaaacgctttacagtagatcctacaccgatggaaatacagatgcgtctttatgaaaatgatatccagacaactctggtggaaaatgcagcacggcaaaagaaagaactggaggtcgaaaaatgaacttgttgcagataattttcctggcattgcttggtttaagtgccggaatgatagtagctggcggtgtcttttctttcattgtagaacttggtgtgatctcagattttgcagatcgtacccataccggcaatcatattttaatttatgaagatatggtagcagccggtgcgatccttggaaacttgtttcagatttttgaagttaatcttccgggaaggatgatatttcttgcaatttatggacttttcggagggatttttgttggttgctgggcaatggcacttgcagaaattttgaatgtatttcccatttttatgagacgggcaaggattgtccggtatctcgcggtgtttgtggtaatggttgcattagggaaaggaatcggagcgggattgtttttttggaaaagatggtaaactctaccgcttcatttctttccgcatccgctccagcacctttttttctgtccttgacacctgcacctgagacattcccattttctttcctatctcagcctgcgtctttcctgcaaaatatctcagataaatgatcgtccgttccttcgcttcaagtgtttccagtacttcttttaatacaatccgatcaagaaccttttcttcctgcctgtctttttcttccagcttatccatcaaaaggatctcgcttccctctttctgatggatcggcttatatatggattccacctccactgacgactccattgcctggacgatctcctcacaatctatctgaagctcttctgataactctttcaatgtcggttctctcccgagtatcctggtcatcttttctctcacctgcagactcttataggacagctctctcaatgaacggctgacttttatcattccgtcatctctcaaaaaacgccggatttctccggatatcattggaacagcataggttgaaaactgtacttcataagaaaaatcaaatttatcaattgccttaagcagtccaatgcttccaatctgaaacaagtcttccggttctgcacctcttccgtaaaatcgctttactacgcaccagataagacctatatttttttcaacaagttcttctctcgcttttttatctccgtcgtgtgactttctgattaaagcgattgtgtcgtccatattctgctccctttacctattgtcttagtcatttttacactggttccttcccctacctttgactctacttccacagtatccataaatgcttccataaaagaaaatcccattcctgaccgatcatcctccggttttgttgtaaacatcggttccattgctttttccacatttgcaataccttttccacggtccgatatttctactgtaaaaagctggttttctatactacaatgtatctttactttctctactctctgttcatatccgtggataatcgcatttgttacagcttctgacactgcagtcttcacatctgctacttcttccaccgttggattaagttgtgttaaaaaggatgctaccgatactctggcaaatccctcattttctgatctgctgtcaaagcggatctccatctcattattctgtgtattactcgcctccatcacttttccccctcataaatctgcataatctttgctgctcctgaaaatgtaagaatcttccggattctttcgttcgtatgtaccgcccagacttctcctccgatcagactgacagtcttatacctccccataatgattccaattcctgaactatccataaaatctgtcctgtcaaagtcaaagatcacatatctgatatgatttctgctgattactgcatccgcttctttcctgatttcatctgcattatgatggtctacctctcttggaagatagatcgtcagacaattttcctgtacctgatatctcatatattttcatgcctcctgtttttctcattttccgtttaattacctgaatccgtacgctaaaaaaggatatgcttcttcgcatatccttttccttcgtaatcttattcgttatcctctgtattgtcagaattatcgtaatctccattatccccgccatcctgagagttgtcggagtcatcggaattttcagagtcctctgatactgaactactatctgcacttgtatctgaacttgtatctgcactggcatctccattcagaattgcaagctgctttttcgcatcctcaatatatctggaattattataagtatctaccatcttctgataccaggtctttgcattctctgtatcaccttttccctgataagcctgtgccagacgataaatagcctgtccatcattataactttcgtccatcttcacaacctttgtcaggtactcaatcgcctgatcatagtcctctgattccagtgaatctacaccggctgcatatcttctcttgcatgctgttgggaaaatagaatcagaaagtgtatcatacatctcttttccactgtctccaagagaatctctagtaatctcaagcagcgcgtctgccatatccgtataactatattctccggaacggctctgacttgaaacctgaagcagtttctcatagctgtcagatgttgcctttgcctgatcaactgctttctgtgcctcgtctccggctgttcgatactgatccagtgttcttgtctgggcactcacctgtgcttccagtgtgttgatttgttcactgtatgcacgcatctgattattcaacttctccgagcggttctgattcaccgccggagcaacaagaaaccagatcaaagcagcaccaagaaccattccgatcaatatattggcaaatgcaagctgctgtgccatatcccggatcttagaacgtttcggctgaatgatcgtctcatttccaagactgtattctactgtcgcactttttggtttccggaaacttctctctgcattcttcccatatccgccacgctgttttgtaacttcttgcaaataggtcagtgtcagttcatttgttgtatctaatttctttgcttctataagaatctgtcttgcctttgtattctgattcgtctgtatatagatcagagccagaagctgatacgccttcagaaatgtcggatgagacgcgatcacctgtttcaactggatgattgcaagatcttccccgttctgctgacagtaaaccagacactggttaaacttcttaattgcctgattcagtgattctaattcattcgctgaattctgtacatttttaatataataatctgcaatattgtctcttgggcacagattcttactgatgatccactccacaagagcttctgaaacttcccctatgccataatacacaagacctaaaagattccgcgccgcaatattctccctgttatactgcaggctctgctgcaaggaaacaattgccccggacatatctctcacctgggctttgcgcagtccatcattgtaccaggaatttgactgatacatgatcttctttgtgtaatccatttatacccaccactatctttctatcttctcaccgttttttctttctttgccataacctcttttacgatatcctgcatatctgtcagatcttccttgtaaacagcttcctcaatctggtccacctcgagacttggcttgaattttctgagttcttcttcataattaagcatctgcaatcaaacctccccacatccgcttaaagattcctgtataatctctttgatcattcctgtcaggtaaagagaaccgagacaatataccgttcttctcccctgaattcgcaatacatactgcattgcctctttgacagattcaatcactgtcaccggctgttctgtatatttccggaacagttcacccagaatgtgtgcatctgtcgctcgatctccgtcgatcaatgttactacatattcttccgcatcagcatgtttacatagatacgaaatcatttcttcatattctttatcttttaccgccgaaaataaaataatatttccatctggattcttcggaacacttcttgcaaatgcctgaatggcacttacattatgtgctccgtcaacgtatacttttggaagaatctcttccattcttcctgcccatttcaccctggcaagtgctgttctccactcttgtggatgaccgttttctttgaaaagataacgcatcacttccatcgcaagcagtgcattccccggctgataggttccaatattatttaatttccacgtggtagttccataataagcacttgcgcaggaaaatgcaatatgtttatcttcaattccaagaatttcgtacgcatctttccctatttttttacagaaacagccttctttttctgctgttttttcaattacagaatcactttctggtgctgtctgtgcaaagaacaccggaacttccggccggatgattcctgctttctctcccgcaatctgttccactgtatcaccaagatattccatatgatccagaccgatcgatgtgatcacgcaggcgaccggttctacagaacttgttgcatccaaccgacctccaagtcctgtctcaaggacaatgtattccattcctgctctgtcataagctttcatcgccattgcaaataagaattcgaaaaatgtcgggtgctccaatcctgcatcctgcatcctgcggacagcctgcatggtctcttcaaatacttcgcagaaaccctcatcactgatctgctttccgttcagagcaatccgttcattcattttcaccagatgcggtgaagtaaacaatccggtgctttttccttctgccctgagcatcgcatccagataagcgcatacagaaccttttccattcgttcccgctacatgaatgatcttctttccattctgcggatttcccaaaaacagaagcatctctctggtatgagccagagagtgctttcttgtaaatctcggaatttcttctatataggttacgatttccttataggtcattttttcttttcttccttttgttctacaaaggcctgtcttccattctcaacatccgtatcctggtctgtcacttctacaagctggcctcctgtatattcataagtcttcgatgtacggaagattgtattgcttgaaccgcactgcgcaaccatgatctgatcgccatctttgatttctgactctttcagatccagtcttgtattgttcaggaattttgttgtctgcttctctccgttgatataaaccttactttgttttgtaaagttctctccgtaaatgctataagttcctttcagctgctccacaacactggtgatcgtcgcatcctttacccccatgaccatatgtccttctgtgattggagctccactgtccttgtatacatactgttttccgtacatgatatcatactggagtaattccagatcagcaagataattctttgtctgtcttctctgctgatggtaattgaaaatagttcctgtatgaatatccaaacgatcaaagacttctgccataatctggtaagcagcgatattcccatctttcttttccagtccaatattgtcccagataacataattcgtattgtacagatattttcctttcaggtcttttgcttccagaccaagtgtcgggagatggtctccgtagaatacgagcactgtcggttcccctctctgctcgattgcatcgatcagctgtccaacgaatttgtccatctcatggacttcatttacatagtactcccatgcatttctcttgccttcatcttccactccggttacattgatctccggattttccaaggtcgtctctgtcggataatctccatgtccctgcacactgattgtacatacaaaatctgttccgtctgttgtgtccaaagactccatgatgttcggaacaagaatatcatctgtcgcccatcccttcggagtcgtctttaagatattcatgaattccttacttgtataatggtcaaatcccatgttgttgtatactttggcacgactgtagaaattaccgccgttgttgtgaagcgcctctgcaccatatccaagggatgaaagcgcacttgccgcactctcaagaggtgtcgtcttcacataagtcttgtatggatactctcccggtccgaagaaacgcatattcattccggtaagcacctcgaactctgtattagctgtacctgctccaacagatggaactttaaaatatccggaagaatagtcagcataaagctttctgagatttgggatcggatcctcggaaaatctcagccattctacctctgtcggatcaaaataagattccagctggacaaacatgatattcggcagttcctcttttgaacggcttgtctcactcacgttaagacatccatccttgttgatctctgccatcgtctcttcactgtaaccggccggctgattgattcctgtattaaataagcttgctgcgaagcaatatgggaatccatagtcttcgtaagcaaatgcgatatttccaaaataatttgagatcactcgcttgtcgattgcaacatcagtaagtcctacataggcaaatccggatgccacaacagcgatcactgcaataatgcggtgcatctttccagtatactgcccaccgcggcgccacatggaaatcacccacaaaacaacagcaacgattccaatggttagcatcacgatctcaaagccattaaagtaattacttgtcagttccaaggcatctgacagaactttcaagtcctgtgcattgaacggtgtcactcgcttcaggagcagatatccgttacatgctcccagaaacagccagaatacactgagaagaattctgacaaatacacgtctgcggaacagataaacaatcataaatgttgcaaaaattaaaaatgcgttaaacagaaacacgagcggtgttcctgtcatgtagctccaggcttcaaaaaaaggatgccttgagatcacctcgatcaaaaaatttaaaacacaggccagcagataatgaaggacgagtgaaaatctgttcatccacttataaaccggctgcatctttttcacaaatttactgtttcttctctgttccaggattctctggcgtcttgcttttttctcctgatagtgtctcttgatatcttccggtttcagatttttgacctttgtaaaaaatcctttgatatctggttttttaatatgaatccgcttcatctataacctctttcttataggcaaaatgcacggcatgggatcttagctcctttctgccgtgcgactttttgccgtctaatacctgatactgtgtctaaactgctgtttacagtttcctgctttttcgcagcttttctccccccacagttatctgagactatcgattctctcttttacctgctcaagcatctttgtatatttctcaagtttatcacgctcagcctgaactttatctgcaggtgctttgcttgtaaatctttcatttgcaagcattccctgtgctctctttatctcgctgttgagtctctcttcctctttcttcagtctttctctctcctgctcgaagtctacaaggtcttccagcggcaggtaaactgttgctcccggaacaacgatagatactgcatcatcagcaacatctttcttctcatagtgaagaataatatcgtttgccagcatcaacggttttacagattccttgagtacttcaagtgctgtaagcagttttgaatcactgctgataatataaacctttgtacgtttgttattcggaacattcatctcagcacgcatatttctgattccgcgtgtgattgcttttacatgctcaataacttctgtagcatatgggaactcccaatcctctctgtataccggccagcttgacatcatcaatgactcttcctccggtacaagtgctccgtagatctcttctgtaataaatggcataaatggatgaaggagcttaagtgcctgtccaagaactgtcttaagtacccacagagcacagtttgcggactgtgaatcttcctccgcatggtagatacgatattttgcgatctctacataccagtcacagaactcatcccagataaagtcatgaactttctgaactgcgataccaagctcgaacttgtccatgttctctgtcatttcttttgtcaggctgtttaccttggaaagaatccatctgtctgccggcttcagcaggaagtcttccggttcctctacaacgttcttctccatattcatcaggataaatctggatgcattccatactttgtttgcaaagttacggcttgcctcaacgcgctcgttgtagaaacgcatatcgttacctggtgcatttcctgtgatcagtgtcagtctcagggcatctgcaccgtacttgtcgatgatctcaagcggatcgataccatttccaagagacttactcatcttacgtccctgagagtctcttacaagaccgtgaatcagtactgtgttaaacggagcttttcctgtatgctcatatcctgagaataccatacggattacccagaagaagataatgtcatatcctgttacaagaacatctgtcggatagaagtaatcaaggtcttctgtcttctccggccatccaagtgtggagaacggccacagtgcggaagagaaccatgtatccagtgtatcctcatcctgtgtgaaatgtgtacatccacagtgtgggcatttctccggcgcttctttcgcaactacgaattcaccacactcatcacagtaataagccggaattctgtgtccccaccagatctgacgggagatacaccagtctttgatgttctcaagccagtgaaggtaaatcttgtcaaaacgctccggtacgaaacgaagttcaccagtcttcagtgcgttgatcgccggttttgcaagctcatccatctttacaaaccactgctgtttgatcagcggctcaacggttgtaccacaacggtcatgtgttcctactgcatgcatgtgaggaacaacctttacaaggtatccctgctcatcaagatcagctacgattgcttttctcgcctcgtaacgatccattcctgcatattttccgcccttctcgttaattgttgcatcatcgttcatgatattgatttccggaaggttgtgacgctttcctacttcgaaatcgttcgggtcatgtgccggtgtgatcttaacagcacctgttccgaattctttgtctacataatagtctgcaacgatcggaatctcacgatttacaagcggaaggattgccatctttcctacgatatctttgtatctctcatcatccgggtgaacggcgatcgctgtatctccaagcagtgtctccggacgtgttgttgcaatctcaaggaaacggtctgttccggcgatcgggtacttaatatgccagaagtttccgtcctgatcctcatgctctacctctgcgtctgacagagatgtcttacatttcggacaccagttgatgattctggagcctttgtaaatatatcccttgttgtataaattgatgaatacttcttctacagccttagaacatccctcgtccattgtgaaacgctctctgtcccagtcacaggaaataccaagtttcttcaactggttctcgattgttcctgcatattcttctttccactgccatgttctctcaaggaatccctcacgtccgagttctttcttgtcgattccctcttctttgagctgatttgtaaccttaacctctgtagagattgctgcatggtctgttcccggaatccacagtgcgttatatccttccattctcttgtaacggatcaaaatatcctgcagtgtattgtcaagtgcatgtcccatatgcagctttcctgtaatattcggaggcggcattactgttgtaaatggtttcttacttctgtctacttcagcatgaaaatacttattctcacaccatctctcatagagtttctcttcgatctgtttcggatcgtaagtctttgcgagttctttgctcatgattgttctcctttttccacatattatgttaattttgtagttgttttccacaatctcattgttttaaaagtggatatctctttcttctataactagaaaacgccctctacttcacgtaaagggcgaaaatctcgcggtaccaccttatttatatatgtaagaacttgttactgtttgtattaaccttgttctttacatatacatctcttcgttctgtaacgtgaacgactccgggaactcctatccaacctcttcgacctttcagaattccggctccgaagctaccttccatcatcctttttccaaaccgtctcacagccagatcctcttagcaatctgaacggttctctctgtgggaagtaatgatgtactcctcttcttcaacacctgtatctttacatagttgttaaatactttttaactgttactactatagctgtcaaaggctgatttgtcaagggatttccctttctttaagaaatcttaaaatatcataaccaccgccggaagtccagccttatcttcttaaccttgctcttttaaaagtaaatgttgcaacattcctgcaatatcatacccgtagttctctcctgtcgcccaaccggctccttccgggttctctttctgtcccagccattgtacataaggtgcggaagcttttttcacatattcataacggttatccacgcaagtctgattcagcggttcatctgtcgcataggccttcagatgctggatctgtgcccgcactcctgttctgacatccggataagaattccccggcactcctccaccggttgttcctattccggcaaaattgaactgttcaatacttacatcaccgccaaactgaagaaatccagtctctttcattgcctgggtaaatgcaacctctgcccggatgtcttctgcctctgcttcttcacagtagatctggcagaatgtttctatggtatcagccccgccttttgccagttcttccgacggatattcgtatcccgattgattgaaataatctgcaagctcatccaccgtaacaacactctcccccatgaccggatactgtccggccggagaacacatctgtgctgttattgctgcactgtcagtctgtgcaacttcttctatcgaatctgttgcctcttctgcaactgcttccttttcattttgcatgtcagaatctgatttctgttccgtttctgactgtttcataacattatttttctggttctgaggaatcattccgttttttcctgccattgccagaatcacaaccagaaaaactcccattgctgcttctatataaataggtaatttcatttcgcgctccctgtccatttcccaggtatttgatatagtatatacaacaattctttcagataacactcaattaatatactataaaaagagaacattcttccgtagctttaccggctacagaagaacatcctcttacacatgatattttgatattcagttataagtattaatctaaatgaaatacctcatgcaggtcaatcgctaccgggctgttgtccggatttgtctccatgatatctgccatgaagtcccaccatttacgattgattgctgtgtctgcactctcatcccattttgccggatcttctacttcaatatatccgtacaggacaagtgtttctttatccagaaagattgtatagttctttcctccatattcgtgaatcatatcctgcatttccggccaaagctcgttatgtcttttctcgtactctgcttccatgccaggatataatttcattttaaatccttttcttaccatattttagtacacgtctttccactctgcgatgttggatgaatcaaatttgaatggtgctccaagaatgatctctgttccgtcatctccagcatctactacttcatagtcacccatgtctccagctgtgaaggaatctccttcagctcctgtgatgtctccgttaacaagtgcgattgatgtataagctgcaaggcttcctacatcgattgggttccacagatacatgtaagggcaggaatgtgcatcatcatcaccaatgtactcagccatctctgaaggaagtccaagtcctgtcagttttacagaagatttctcgtcctgaagaacttttgctgctgcgttgatacctactgttgtaggagcacagatcagtttcagatccggatattttgaaagaagagcctgtgtctggtctgttgatttctgtggttcgtcatcaccatatgctacttcaacgagctcaagtttggagtatttgtcatcagattccataactttcttcattgcgtcgatccatgcattctggtttgttgcctgagatgttgctgagaggattgcccactgtccttctccacctgtgatgtcataaactgcatccatcagagtctgtccgatttcttttgtaccagcctgatttacaaatgtcatacggctgtcagcatttacctttgagtcaaatccacaaaccttgattcctgcatccatagcttcctcaagtgctgcctgaagagcgttctcatcatttcctgcgattgcgatagaatcaactccctgtgagatcagagactgaataacagatacctgtgcgtcagctgtcgcagattctggatgttttacgatacattctccaccttctgcttcaatgactttctggaatccttctgcctctttttcattgtaaggatttcctgctgattttgttacgattgcatatactttctttccggaatcgcttttgtctccgccattatcagatgtgtcatttccgctgcttccacatcctgctgccattgaagctaccattgttgcgcaaagtaatgcgctgatcatttttctcttcatacttttgtcctccacttttaggaaattttctttttgcaggaaagtctgtttttcaactgctttcctgcccctttatacaaaacgtgtctcttcccggcacgtctggtatcatattaatatcttttctatagtaacatcttttgcgctacgattgcatcttattttgctgatgctgcttttttctttaatttcagttctcctgcaatgttcggaagcaatactgccagaataagcagagctccaaggattacaaggataagctgtgggttcatattgatctgtccaagaccaattctcagactgatgataacaaatgctgcgataattccgccgaccagtcttcctttaccacctgatgttgaaattcctccgaatactgccattgcgattgcatccatctcaaatccgttacctgttgttgtatttgcgccatacagtacagatgtaaggaacaaagcggcaaggccggacataaatccaagtgctgtgtagatgatcaggcggattctctgtaccggaattccggcgaaataagctgctgtgctatttgatccgattgcatatactgatcttccgaatgttgtctttgcaagaacaactgcaaagattactgcaagaattgcaaacaggaagaagatataaggaacaactccgacttttcctgcgattgcacggaatccgtcagtctctgtcagagagattgatccgccgcttccaagcgaaatctctgcgatacctcggaagatgatctgtgttgccagtgtaacgatcattggtggtaattctgtaaactttgtaagaaccagtccattgatcagtccacatactgttccgactaagagacatacaagaacaactgctccgaatggaagtcccttattgcataccatacaagtccaggttgatgagagacatacaattgctccaacggagatatcgatttctccaagaatcagtacataggccatagccaacatgataaatccttctgccagatattttggcatctctctaagtacatttgttacatgaaagttcggtgagattgatctgcagaagatcacgatcagtacgaatactacaaccagcattccttcccaactcaatatatttttctttagtgatttttctgggacatttgaaatatttctaccagattttcctgccatgattacatctcccttcctttcagattgctcttatccattgctctctgtgttactacattgaggataactacaaccataatgataataccctttactgtgttctgggcgattgattcaattccgacaagcggaagtgcttttgcaatgattgcaagaatcagggatccaagaagtgctccggatactgttccacgtccacctgacatgcttacaccaccgattacacaagctgcgataacatccatttcttttgcataaagcatgtttggctgagctgatgcatatacagatactgcaagtgctccgcaaagtcctgcgaggattcccattactgtataaaccagaaggtcaatcttctttgtgttaatacctgaaatagctgctgcttctctgttacttcctactgcataaaccattcttccgacttttgtccacttcattacaacaaagaagatgacatagcagatgattgtaacccagataacattgttcaatccaagtgtttttcctaatgcaaagtttttaaatgttccaaggttttctgcacttgcccattcactattactgatcaggtaagccatacctctatagatgtacatgaatcccatcgttgcgataatcgggattactttaccataagcaattactaaaccgatcacaagtccacaggctgctccaactgcaactgcaataagaaacagaagcggtgtgcttgtaacaactctgtttttcatcagcattccaactgtcattcctgaaaatgaaagtgtagatgcaacggagatatcgattcctcctacaagtaaaactccaagcattcccaatgccatgatcatgataactgcattgttcttcagcatatctgagattgacttcgccgtcatgaaagaaggactctttgcagtgatcgcgatacaaagaacaatcaggacaatcagcaggctggcttctcgggaagctgtgatttttttcaaaattgattttttctcattcatctttccctgttcctccttactttgatttttccattgcaagctcgaggataccttcctgagttgcttcgtctttgttcagttcacctgtgacttttccgttacacataataacgattctgtcactcattccaagaatctccggcatttctgaagagatcagaacgattccatatccctgttttgcaagatttcccatgatctggtaaatctctgccttcgctcctacatcaacaccctttgtcggctcatccatgatgaccactttcatctcctggctaagtgctttggcaactactactttctgctggttaccaccggaaagtgaggatgccgggtcaaaaattgtaactgcctttgtatcaacttcttcaagaagctgttttgcaagatcgcgttccttcttattatcgttaaatccgcattttgcatatttgcccattgtcggaagtgttacattctgtcctaatccccagctcatgatcagaccctgtttctgtctgtcctctggaagaaggatgatacctttcttcatggcatcgataggtttcttaatatgtaccggttttccttccagatatacttttccggaatcaggtcttgtgattccacagacactttctacaacttctgttcttcctgctccaaccagtcctgtcagaccaacgatctcacccgctcttacgctgaatgaaacatctttataaaatcccgttctggaaagtttctctactctaagcacctcatcaccaagctgtacatccggcttcgggaacagatcactgatttcacgaccaaccattgccttgatcagatctgcatttgtgattccgtctacatcataagatccgatgtactgggaatctctgaaaaccgttactcttgttgccagacgatacatatcttcaaatctgtgagaaataaagattattgatacctggttctctttcagcttatctacaattttgtatagcttttctgactcattctttgttaatgctgctgttggctcatcaagaataatgatctttgcatttgttgaaagagcttttgcaatctcaaccatctgctgctgagcaacacttaatgctcccatttcatctgtagacttgaaatctgcatctaactgtttaagtaatgctgttgcctgtttgttcatctctctccactggatcattccattctttacaatctcatgtcccatgaagatattctctgcaactgttaaatccggataggatgtcggatgctgatatactgctgcgattcctgctgcctgagcatcctttggtcctttgaagtctactttctttccttcaaggaacatttccccttcttctgctttatgtactccggttattactttgataaacgtggactttcctgcaccgttctctcccatcagagcatgaacctcgcccttcttaagctggaactgtacgttgttcaatgctttgacacctgggaaaatctttgtgataccttttaattccaaaatgtaatcggacaccgcttatccctccctttttctttctgacttaagtctagcattggtattatttttttaatatcgcaaaatctttcgatttcgggtaatttctttttgtctttgctttctgttgaattttaagtattttatatgcggttttttgttgaattttatattttatttgttacaatgtaactattcacaggttaattatttgattatcaccttattagatgaaactgtttcggaggattttttcaatgaaattattaattgcagatgacgaaatacttacaagaaacggactggtcacttccattgactggaaatcactcggtattgatcaggtatttgaagcttctgatggaatggaagcctacaatacagcgtgcacatcaaaaccggatattattctatctgatattcgtatgccgagactttccggaatcgagtttgcagagaagatcaaagagattcttcctgatacaagcctgatttttatgagcggatattcagacaaagaatatttaaaggccgccatccgcctgaaagctatcacatatgtagaaaagccactggatcttcaggaggtaaaggattctgtccaggaagcaattaacgaacaccagacacgattacagacaagaagttccatgaagcttcaatcgaaagaaacttcttcgcgtcttgcccagttgctgactcgtccatataatgaaaaacaagaagaaatcgatgaactgacagataagctttccatacattttacaccgcagacatattttacctcttttattgtaaaattacgctccggagattttaacgctgctcttttaaaagaaccatttgatcgtttccaggacatacttgaacattatcatttaaaatcgcttgcggttcgtttacataatgtacattacgtgtttcatatattgggagaaaaggttccatctgataccgtattttcttccattgaaaattatttaaaagaaatgttctctccgttcggtgatttttatatttcccgtggtgagactgtacgcggaatcacaaaggtttaccaatcttatgcaagtactgttatcctgcttcaaagcagctttttcactactgtgaacagcgttttggatcagaaaaaactggaatcagatgctacctccaaaacagtaccttctagatctgtagaacaatttctcacattgctggtagataataaccaggaagatacgcgaagttttcttgataatttgtatcaggtatattttaataatacgaaactgcttccgaatcaggtaaaggatatctacttccggcttttctcttctctgactacttgtcggcagaaattaaagctcacctcagaatctaccggacaggaaagtatcctccaacacctggaagaatgtttctcctttgatgaaatgcatcagttgctctgcaccagaacagaagaactttttcagtccatcgaaggtgcaagccaggaagactctactatttttatgatcaaagattatatcagcaagcattattctgaagagcgcctttcaatcaaggaaattggtgatcacgtttttctgtctgcttcctatatctgcacctatttcaaaacacagacaggacagacattaaatcagtacatcacagaatatcgtatggaacgtgcgatgcaactgcttcaggataaacgttatgcaatcacagatatttcagaaaaagttggatataacaatggaaattattttgggaaaagttttaagaaattcaccgggctcacaccttcgcaatatcgcgataaaatgttgggatagatataaggagattcaaaaatgtgctttctatggaaaaaattaaaaggatattacaaaaatctcaaaatccagcaaaagctgactttttctcatctgattattgtgctgattccaatgctggtcatcggagtgtttttctacacaagtctgtatgacatgattgtctcaaataccattcgtagcgaacaggaacgtgctgctgaaactgctccacttgtagaagacgccgtcaaggagattattgacgttcatcgttcacttcgcggcagcggtttttacaaaggactgacttccggaaaatatcttgataatcttaaagaactctcctacggtacggaagcagaacaattcagacaggatgttctaaagttcagctctatggaatctatctcagcggtacgaatttatgttgacctggatgaaagtgagcttccctttacagctggacgaaagtactctaccctgcagccattggataatatcagaagtactcactggtatggaatctttcaaggttctccagccatagcaaacttgttatgtccttccttttatcttggacattatgaaattgaaaactatggtaatcttgcttatgttacaagagactcaatcaataataatggcgaatatatcccttgctatatcgtgacttatttctctgacagttacttcactaagcttctacaggataatattacgagtactgaaaatgttgcctatctggtgaattcaagagataatctggttgctacttccaattcgttcttatatggaacgtaccccttttcaagtgatgaaatacgagaaaacatcatgtcttcgaacaattttatcactaaaacagtacttggaaaaaaagtatatgcaggattctatcggattaagaatactgactggtatatggtagccgttatgcctgcggatccaatcatgaaaaaaagtacacatatcatctgtaactttttgttgatttatattgcttttcttttgattgcatttattattgcttcacgtctgtcgcattcgatgaccagacgtttgtcacttgttgttaaccaaatggcaaaggtccgttttgaaccacctgttcaactcaaagacgcagacagccaggatgagattggtgaactgattgatacttacaactatatgtctcgtaaaatccaacagcttatggatgaccaggcaaaagctgctgagaatctccgcattgctgagtttgattctcttcaggcacagatcaatccacattttctctataatacgatggatatgatcagttggcttgctcagcagggaaaatcagatgaagtaaccgaggtggttcgtcgtttatcacgtttctatcgtttgacactgagtcggaagcaggaactcacaacgattgcagatgaagcagaacatgtaacaatttatattgaacttcaaaacatgcgtttcaataatggaattgattttattatggatattcctgattatcttatggaatattctatgccaaaactaatctttcagccacttgttgaaaacagtattatacatggtatcatggaaaaagaagaaaagaccggatctatcgttcttaccggttggatggaagatgaagatattgtgttgctcctctcagatgacggagttggcattgatccggatattctacctaagttcttagatggcacattccataacccacaaagcaaaggctcaaatgttgcagtttataatacacaccgcagattacagattttgtacggtgaacgctatggattaagtttttccagtacaaaaggacagggcacggaagtccagataagaattccggcaattttgccataaataagcacaaaaaagaagctgtacatcgcagcttcttttttatgcttattatttccacaatttcttatagatttctacaacatcttcctttgaaggtactctcgggtttgttgctgtacatccatcctcgagtgcggcatctgccatactgtcgattgcattgaagtactcttcctctgagattgtacccatctgagagattgacagcggaatatccatctcttttaacataaactgtacccagtttacaagggatctaactgtcatgatctcattgtagctgctcagtccaaggatctgagctacggttgcataacgcttaacagccggaagatattctttctgactcttactatgtttattgatatcactgttgaattcaatgatatgtggaagaagcattgcgttcgcacgtccgtgtgggatgtggaactttgcacctaactgatgagccataccatggttcagtccgagagatgctgagttgaatgccagtcctgccagacaggatgcggaatgcatcttctgacgtgcatgagtatcatttccatccagatatgctctgagaaggaatactccaaccaactcgattgatttctctgcaagtgctgttgagaaatcgcttctatctgtacttacacatgcttcaagtgcgtgtgtaaatacgtccattcctgtatctgctgtaatcgccggtggcacactctttacaagttctgcatcgaggattgcctcgtccggcgtcaattcccaggatacaagtggatattttctctgttctgccgggtctgatacaacggcaaatgaagttacctctgatcctgtaccgcttgttgttggaattgcaatcagccctacctctgcgtaatgatctacgcgaagtgcaaattcacggattgacttggaggagtcaattgctgatccgccaccaactgcaacaattgcatccggcttatattcaagcattttcttaacaccgagactgatcttctcaatcggtggatccggaacaatatcctgaaagatatcatattccttacctgcttttttgattggatcgagaatcaggttcagatttttgcttttcgccataaatgggtctgtaacaatcaggatcttcttatatggcacttctgccagtcgatccagcgcattatctccaaaatttactctagttttaatctgaaagcttttcataactgcccttccttactttggatagatacattttacaccaatcttatcaaaatgctgaagccatcttgtttccggctttgcatccgtaactatagttgtgatctgatctaatgaacctatctcagcaaatgctacttgatcgaacttactgctgtctacagcaagaattttttcttttgctcttgtcagcattgttcgcttattattcgcatgcagatcatctgaatctgtaagtccagcgttcatatcgattccctttgcagagataattgccttatctacatgataagatcgaagcatccggtctgtctgataacctaccagtgcaaaggatccttctcttgactctcctccggtagagagaaccttccaatcctgcgccccaaaaagctctatgataatctccacagagtttgtaagcacggtaagattcttctttccctgttcgagaagtgtctttgcaacatacactgctgtagaacttgcatcaagcatgatgctgtccccatctttgatctgttcactcaccagttccgcaatatgctgtttaccaacaatattgcgattctttctgatgttgaacggaagctcgatattcacattttcattaattacggcaccaccatagctttttatggcgaaaccgtcctgaaccagtttatcgagatcccttcggattgtttcctcagagacctcataaatctggcttaattcacttactacaactcgtctgtcgttctgcagtttttctaatatttcatttcttctctctatcgcaagcatctaactacctcctgtcctaagtccaatataatgttactggtattgaactataattccctcagacattaaagcagagttcattataagattgcgtcgcgaatctgagcatccggatgagcaataacggaagagtcaaggaacattcctctatctttgattgcttccttagctttttcgattgcagcttctacagcagccacttcaccagtgagcagcatgtaggattttccgcacataccacgtgcgatacgaagctcgatcaaatcaacgatagccgtcttcgcagcctcatcagcagctacaataattgaagatgcatcgtatgtctccataataccaagagcggatacgtcttcaatatgtgcagcaccgtagattgccgggaagatggactcgtgcggattaccgagcacaaaactgtcgatcaggtgaagaccatgcatctcttttgcattatccactgctgctttaacggcacttaagtcacctgtaatgatcgcgatatatttgcccggacatactgtctgtgcttcgattatgctgacttcagaagtctttaccatagcatcagctgcggtaatacctgctgaaacagtcttatattctaccattccaatagccttactcattgcctgcacgtccttcctgagattctatgacaatatatttctcatttacttctgtaactaaaccattcacggatgcgtggattccaacgcttaatccctttcctggttcagcaatcatctgtcctttagttaccatgtcgcctgctttcacaattgcagaagcaggtgctccaatatgctgacttaacagaatacgtactgtcttaaccggcactgctgattcatcaagcggtgcttcacggttatatctcgtaagatcaagacgcgccataagtctctccatcggaacttttctgtattctctttccggtcctacaggttttgcttctactttcggaggacggattccgtttgcacgaagacctcccttgtactctgccataagacttcttggtgaaagtccctggaaacaggaatacatctcacaaagtccgcaggatgagcagaacaacgtattgatgaagatgttcggctcctgtacatccttgcatgttgctgcaagcataaatttatttggctcaatcggatgtcctaacagatgtcttggacataagtctgtacacattgtacactggcaacagcaagctgctgctctcttcatatcgattgagtttttctttaatttcttctgaatgatgtgatggtctttcggaagaacaaggattgcatttgttgtctttgtaacaggctgcgctcctgttccgatattacccatcataggtccaccaacgaagtaaactgcatcttttgtagttacaccgccggcaagagctactacttcttccagtggtgttccgattggaacacgaactgtgattgggtgctctacctcagctactactgatacaagcttgtcctcaacaggtgtcttctcattcagtgctctgtatacattgtaaactgtctctacgttaaatacagctacgccgctttcgattggaagtccgcccggtcttacaactttacctgttgtctcataaataagaacaacctcatcacctgccggatatacttcatccaacagtccaagtcttacttccggatactgtcccataacggcctttacagcttcgatcgttgctgtgtaagctttcttaataccaatgatgacttctttcgcaccgactgtctcgccgatcatatgaaatgtatcaatgatctcctttgcatatttctcaaggagctgtctgtgaagtcgaagcagtggctcacactctgcacagttcagaatgattgtctctgcacgttcatctaatttagcatatgtaggaaagcctgcaccaccagcaccaacgataccgttctgctgcaatatgctgcttaattctttcatatccataatttcactactccagtcctaatccttcgtcaataattccaacgattgcagcatcgattggtgcttccggcataccacttccgattctcgcagcacttccctgtacaaccagaacgtattcgccgattcctgcgccgatcttatcgattgcaatgatctgttttgctccctgacgcatatgatctgccacttctacaatcatgaatttatttccgactaagttttcattcttgcgtgttgatacaacactgccaacaacttttcccattaacatgatacaatcctcacggtatccccgctcttaatctgcgctgcatttgcttcatctgtatcgatgtgcatctcaagtgtaaagctgtcatctacacggatctgtacgttgttaaagatggttcctctctcattatctgcttttacagatacgatatcaccatcatgaactcctgctgccatcgcatctttcggagccatgtgaatatgtctcttcgcaacaatgcatccctcgttcagatacaccgcaccttttggtccgatgatcgcgattggtgcgcttcctgcaatatttcctgattctctgattggtgcttttacaccgaggctgattgcatctgttgcagaaatctctacctgagtattctttctgactggtccaagaactcttacattctcgattgctcttaatttaagaccaacaattgtaaccttttcgtttgatgcaaactgtccacccataagttctttgaactttgtaagatggtagccttctccaaacagaatctcgacatgctcctgtgtgagatggatatgtcttgcggacactccgattggaacgagaaaaccttctccagactgagcagcattctttttctctactgcttcgagaaccatttttgtaattaattccacattactgttatccatatttgtgtctcctcgcaaagtggattgctccacttacttatttaagcactctcaggggatcagcgcccggcgcttaatcccctaaaagtaccggctttatttacctttgactattatttgatctgtggaagaatcttctcaacatctgtatgtggtcttgggattacatgtgtagctacaagctctccaagtcttcctgctgactctgctccagactcaactgctgatttaactgctccaacgtctccacgaaccataactgttacaagaccagatccgatcttctctgttccaacgagtgctacgttagcagcctttaacattgaatctgctgcctcgatagatgctacaagtcctcttgtttcaaccattcctaatgcttcctgtgacattctgcgttcctccttctgaacttccggtttcttctgaaccgtttctgccttttgcgccgtctttcttactctgcgtacagttttggctggcgctttggctgttgttgttttcttttctttttcgtctgccatctgtagctgcctcctatacaaccttgtttacacttgtgttaatgattctcaagatctcctcatgaggacttgggatcactactgtgctcactggttttttgattccattctgctcggcagcttcaatggcctgcgcaactgcggatacatcaccacgaattatgatcgtgacaagtcttccacctagttttttctcccatgtaacgaactgcacatcagcagtcttgcacatgatatccacggctaccactgctgccgtaacgcttgggatttcaaagaatccatacgcttttcccatgagactgctccttttctagctgtttgacttcaaactatactgtaggaaggatcttctcaacgtcgttgtgtggtcttgggattacgtgtgtagctacgagttctccaagtcttccagctgcgtcagcacctgtctcaactgctgctttaacagctccaacatctccacgaaccataactgttacaagtccggatccgattttctctgttcctacaagtgtaacctctgctgcttttgtcattgcatctgcagcctcgattgctgctgtaagtcctcttgtttctaccattcctaatgcaagctgtgccattgccattgtaatatcctcctaaatttcttcgacttcttcgtctgttactttgtgtggtgttcctttgtcaaatgcgttaagcttaagcatcttctcagtgtcctcagtcggtcttgagatcttatactttgtgacaattcctgtcattgactctgctttcgctgtagcagcctcaagtgctgcctccacatctgcaacctgtccgcggaacttgaccattacgatcaacggtacaggcaattcgtctgcattcgcaggtttatttttatcgaagttctccagtcttacatttcctgctttacatccggcgtcagccgctgcaaatgctgttgcaagtccgaatacttccagcatacctactgcttccatactctctcaccttatttgttgatgattgcaatcttaagacctttcatagccaggtttgtctggtgagcctcattgatctgctcgagcgggaactcgtgtgtgatcagatcatccatcggaagtccgattgcttttgctctcttaaggaaatcaaatgtagttgcataatctctcagagtgtatacccatgagccaaccagtgtgatctcttttgagcaaagatcgaagtgtgggttgattgttgcatctccaccattgataaagaatccaagctcacaaagtccaccaccattacggatgaatttgtaaatgtttgcatgagcgatcggtgatcctgtacactggaatgcgaagtcagcagcatgtccgccgaatgcatcttttactccctgtgcaagtgcatcgattccctggaaatctttgaagttaactgacttctcagctcccattctcttagcaaagtcaagtctcttctgctctccgtctacagctacgatattctcaatacccattgtacgaagaactgcgatacagatcagtccgatcggtccacatccctgaacaacaactctgctgttgaatcttaagattcctgttgtcttagctctttctactgcatgtacaagtactgcacatggctcgatcagtacacgggatttcagatccagatcacttacgttgaatactgtagatccctcacggatcaggatgtaatctgagaaccatccattcagatgaacatcatcgtccggaagaagtccgtatacatcagctccgcctacgttctgtttgttgaggtcgtacattgtgatctccggatcatccttgaagatcatacatgtaacaactttatctccaagattcagagcttttccagcgctgtcaactttaacgtttttacccatcttaacaatctcacctgttccctcatgtccgagtactacaggaataaggctgaatgggtctctcttgaattcgtgagcgtctgttccacaaacaccacatccttcaactttaacaagaatatctccgtcaccaacttccggcatcggatactctttgatttcaaaatgctcaagtgctgtaagcatagctacgtgagctgtctttggaatttcatttcctgctgctttctgtgccggagctgcttctggaactttcttttccagcatgctctcaagtacctgttttacaacagcttctacattagcagaattcatttccattgtctatacctccgttatcttatacataagctgtctgtcattacgcaacgtcttctctttgtgaagctgcttgcgcttgtaagtccttcaccagttctgctggcaattgtaaatgtacagaagccttcgcctccgaatccaagtgccgcataggatggtccgttcttaacaagaattgctgtgtcaattgcttttgcatattttgtaatacgatctacattcttggaatgaatgtgagcggaatgtctgttaccatgctcaagccatacagcctgttctacagcatcgtcgaaatctttcgctcttactacaccaagaattggcatcataagctctgttgcgatcagtgggtgttcctttggtccttcaaatgtaatacatctgatattgtccggaactgtaactccgatcattccaagcagtgtctttgcatcacgtccaacacattttctgttcagctttccgcctgcaagaactacatttgtcagtgcatcctgctcttccttggaagccaggtagcatccctgctcatttatcatgtagtgcatcagttcatcagcgatagaatcaactgcaacaatctctttttctgcgatacacggaaggttgttatcaaatgtacatccgtttacaatatcctcagctgccttacggatatctgctgtctcatcaacgagtgccggtgggttacctgctccagctccgattcctcttcttcctgaagaaagaactgctgtaacaactcccggacctcctgttgcagcgatcagctgaattgcaggatgtttcatcatgatgttacttgtctcaagtgtcggatgctctactgtacaagcaatgttgtccggtccaccaacctcaacagatgcttcattcagaagattaactgcgtagattgatgttttgattgctgccggatgtgggttgaatactactgtatttccacctgcgaacattccgattgtgttacagagaactgtctcacttgggtttgtacaaggtgtgatcgctccgattactccgaacggtcccatctcgatcaatgtaagacctctgtctcctgaccatgcctgtgtagtgatatcctctgttcccggagtcttctcagctaccagctggtgttttaaaattttatgtccgacatttcccatgccagtctcctgaactcccatacgggccaggatttctgcattctccatgatctttttacggatgttggagataactttctctctgtgatccagtgacatcttagccacgatcttctgggacgctttcgctgcctcaatggcctcgttcatatccttgaatacaccgcggtctccctgtacatcagaagcgatctgcatctttgcaagaacgtcctgtacaatgtcctgaaccatctgttcatttatagacactttaatacctccttgaagacttgttttccgtaagctgcgattgctgtgtcctgctcagcagttccgccgctgacaccaagtgcaccgacgatcttaccatcagcttcgagtacctctccgcctccgaagatcacgatcttaccatcattcgtaaactgaattccgtataatggctgtcccggctgactcaactgactcaactctgctgtggacatcttaaggctcgcggaagtatatgtcttgtttaatgcaatgtcaaagctcgctatgtaggcgtcatccatacactggacggctacaggtctacctgccttgtcggaaactgctacaaccgcattcacacccacacgtgccgcttctgccttaactttttcaatcaaggcattagcaagcttcaatgtcatctgatgctttttgcattgacagacatgtttgtgtgtatgttgtggagctgcttccttcatctgatccagcacagcctgaactgcactggtaatttcctgctcattcatagcattgctcctttactaatctgtcagattaccttcccagctgttccataactttctttgtgatagaagctacaagatcagcatctgttccttctggagctgctgctgaagatccgccacagtttccaccgcatgaatggcaacttggcttaccagctttagcgttcgggcaaaggtttgccgggtgttttcctggaagtcccatctgtcttctcagttcgtacagtctctgaacctgctcatcgttcagttcctgaggtccgccaatctgcatggactgccataacagacgtgcgtagaactcaagagactccatcttgtggtatgcgctcagaaggctgtctgagtaagcaagtgctccgtggttctcaagaagaactgcatcaaagtgctgaaggtatggctcgacagcgtccggaatctccattgtagaaggtgtaccgtatttagcgatcggaacacatccaagagcgataactgcttctggcatgattggctgtgtaagcggaataccagcgatagcgaatgttgtagcgtacagtggatgagcatgtactacagactgaacgtctggtctctctctgtacacacgcatgtgcatcttaatttctgaagatggtctgaatcctttgtttgcctgaagaacattaccattctcatctactttacagatgtactctggtgtcatgaatcctttgctgacacctgttggtgtacacaggaactcatggtcattcagttttacagaaaagtttccgtcattagctgcaaccattccacggttgtaaactcttcttccgatttcacacatttcttttttgatttcgtattcgttttgcattttttctcctccttggaatcgtgtcaaaacttttgttttgtgttgtttcttaacttattttaccacacaatcccacattagtcaatttgaacagccgttgtttttattgtttcttgtgattattttcactattttctctgttttcgacttcgtgtagattatctgattgtgttttttatttttaaccaccgatccggcactctacaccggaaacttcttctgctactttcagaagtcgttccatcttttcatttgtcggtggttttacatcccccatcaggtatgggcggttcagtccgtcatatttatcctgtcccagcctgtggtaaggcagaagatgcattcttcttacattgccaagtttgcggacatattcggtaatatcacggatttctatctctgtatcattgaatcccgggattaccggaacacggatgctcaactctgtcatatgagagtctgcaatcttctttgcattctctaacatcagttcattcgagcgtcctgtaaattctttatgtttctctggattcatgtgtttgatatccagcagatactggtctaaatatggaagaatctcttcgattgtgctgtatggtgcgcatcccatactttccatcgcagttgtgattcctgactctttcgctgcccgcagaaggtctcttgcgaacttcggctggcaaaggctttcgcctccggaaagtgtaagtccgcctccggttcttctataataagtacggtctttttctaccgtcttcatcacttccgcaaccgttgtgtcctcaccgatcacttttggttctccctgcaccatcattgtctcgatctcgtagtgctgcgattccggattacagcaccagcggcatctgagcacgcaccccttcaggaacacgatggttcgaattccattcccatcatggatggaataccgctggatatcgaagattcttcctttggtcttcagatattcttccatgctgtctcctcttattcttaaaatccctgctctgttctgcggatgatatcatcctgcagtgacttggacaatgtcgtaaacagtgcactatatccagctacacgtacaaccagatgtttgtactgttccggatgctcctgtgcgtccagaagtgtttcacggctgacaacgttaaactgcatgtggcttcccttctgatcaaagtatgactggatcagtcctacaaacttctcaagtccttctcttccactcagtgcagacggatgaaacttctgattgaacagtgttccattcgaagcaataaagtgatccaatctggaaacggagtttgcagctgctgtcggtccgttcacatccttaccggctgatggcgatactccatcggctaccggcatatgtgccagacgtccgtccggtgtggctcctgtctgtccgccaagcggtacattcgctgatactggatataatcccgcctggaacatacctccacgtggatttttgtatttctccagtggttttgtataagtataggcaacgtctcttgcaaatgcatcaacctccggaatatcatttccgaacttcggcactgcatcaatcagcttgaggattctctcaccattcgccttcacctgctctgattctgtcgctgcaacaacagtcttcaggattgccgcaacttctttctcgcctaccggctgtccggcagacttcatagcagaagccacttctgataccatctctgcaacatcatcacttctcagaccttttccatagtttgtactaagagccatcttcaggtcatgcattgtaatcttgttctcgtcataaacgagtttctttactgcgtaaagtgcatctgccatgttggcaacaccgaatccctgcggacctgtaaagttatatacagctcctccctgttccagtgtctttcctctcttgatacagtcatcgaccatacttgccaagaacggaagcggtgctctctctgcgtgtgccatatcaatagcattgtcagcattaacaagtagtgcgattgcgtaatccatctgtgctttataagcatcatagaattcatcaaatgtcttcatatcctcaacattacctgtctttggaccaatctgtacacccttgtccacaccatttgaaaataccagttccagcggacgacacatattgaagaatgctgcatcatgccatccgttcgtcttaccggacttctgtggttctacacatccgatgatattgtagtctctcgcatcctgcaaagtcagtccacggctctccagtgacgggataataacctcatcattataatacgccgggagtccgattcctgttcttgtaagttctgctgcataaatcaggaattcatgtggtgatccattccaaactcttacagaaagagaaggcattggaaggaatacatgcatagatgatgtaatacacataaatgaaagatcattcgtaacatctatgccctcttcattctgtcctcctacgatcaggttctggaacagactgtaacctgcgaatccttctgctgaagccgcatcacggcacttgttcaggtcatttaatttaacccagatacaatccaacagttcttgtgcaaactctcttgtgatctttccgctgtcgagatccttcttataataaggatacatatactggtcgaatcttccaggggagattgaatgtccactggactcgatctgtaacagctgctgtacaaaccagaaggactgacaagcttcatagaatcctgtcgcacccttctccggtacattcgcacaattctgtgcaatgataagaagttctttctttcttaccggatcagaacatttctcagccatctcaagtgcaagctttgcataacggcgggcatatgtgattgctgcatcacagctgatcatcactgcctcaaggaaacgtgattttgtctgatagttaccatcactgaccttcatagaagcaagctcatcttctgctttcttgcggattccggaaaatccgatctcgagaacttcaccatacttaactgtcacatgtcctacaccattatagaaatagtttccaggtgtaaagatattgtgttcaatgtcaagtaatgtctccggctccatgtatgctgtagccaggtcacttgttgtacggcctttccagtaagcattcgcctctttcagttccttcttcgtctgctcagagatatagaacgggtcggcacttcttgtttcaactgtatcaaactctgcctccaaccactcgtaagagaactccggaaatgtctggcatcctcttggggcaagtgtactgcttccaacaacaagttccaggtcacggatcgtgatcggaatattctccaaaatatgctggaacgcttttgctctacggatgatcattggttcattctcagtctgtttgtacgactccgtaatcagtaccgctctcgccgactcaatctcaggcatcttcgcatacaggttttctaccagttttggaattctgtccgacttcgggatgggagtactgtcataagtataaagtcccattttgctcttaaactcctttcttccaatattaacatttattatactttatttatcccccaaagtcaatcaaaacacaatacatcccacattatatttctgtaaagttacaataaatcccaatacggttcatgttgtgttttatttgttttttctttacgtttcacctcgaatttattgacattttacttaaaataccgcatacttaaggtatatatgcggcatggcgaatgaatcaacacaatgtctgccgcgtgaacgattagaaagaagggttggattatatggcttcttatgaatttgatatccacacacattccatcgccagcgggcacggaacctgtgcgaccatgactgatatggcaaaagctgccaatgcagctgggcttaagatgcttggaatttccgatcatggtccaaaaacgcttggtggcggacgcatttcttatttccgcagccttgcatttgcacaaccaaagcgtctcggtgttagaatgctttacggtgcagaggtaaatattctggatcaggaaggaaaactggatcttgatgatgaaattttagagtctctggattatgttatagcaagtatgcatcgtccaatttttaaatccggaacagcagatgagaacacccgtgcttatatcaagactatggagaatcctaatgttaatatcatcggtcattgcgatgacgaaaaattccctgtagattattttgcgcttttccgtgctgcaatggagaaccatgttctgcttgagatcaataacagttctttaagtccggatggatatcgtggggatacgacctacgctgatctcttaatattgaatctgtccaagcactttaattatccggttctgttctccagtgacagccacggcaccgaacatatcggtgacttccagtatgccgaagctttggctcgaaaagctgacattccggaggatcttatcctgaattactctgtgcgtaaattcatgggatttttaggagagagataatactataatatagaaggaatacttacaatgggaaaatgtcttttctttgatgccgatggaacaattttagatattgtaaaaggaacaccagaagatacaaagctcgcacttcaacagctgagaaaaaacggacacaagactttcatctgtaccggtcgttcaaacgcttttgttccggaatatcttatgaaggagattggatttgacggacttatcgctaatcttggagcatatatcgaatataatggaacgcgggtatttgagcgtgagatgccaactgatctggcatggaagaccgtagagatcattaaggcaaacggttttatccctgtactggaaggcaatgattatatgtactataatctggatgaatatacaagtgacatagactggtttgctgatctgatcactcaggaactcggtgacaaactgcttcctattcgtggaaatgaacataatcttcactttaacaaaataagtgccaagcgcacacccggatgtaatccagagaaattatgccaggaattatccctatggtatgattatattattcacagtggatcttttgttggaagaacgattgaatttgtcatgaaaggctgttccaaaggacttgcgatcagtgttatgagtaatgtacttggatacgaaaagagggatgttattgctttcggcgatagcaataatgacttgccaatgttccaggctgccggatttaaggttgctatgggaaatggatctgaagacttgaaatcacaggctgattatgtgaccggcgccttggaagacggcggaatccgccaggcgctggaatctctgaatttgatttaaaaaggatactccattccttgaccaacttcacattttcgaacaaaaatggggcatatcaatttcctgatatcccccattttttcactctttattatgctctcttagacagcacttcatcctcatatttctgaatctcgtcaaaccatccttcagcttctacaccacactgacggcagtactcttcccatacatcaccgattggaagtgtcttgcactgttccataacaaccatcttcttgctcatctggtttgtatcctgaagctctttgagcatctcgcttggctgacaaagtgcatcaagcagtgctttctggaagctgcggaatcctgttacccatgcggagatacggttgatggaagcatcaaagtaatccagtgcaatatatgtacggtcaattccgttctcgcagcgaacgatctcttttgcgatctcttttgtctcatcatcaaagagaactacatggtctgaatcccaacggatcggacgtgtaacatgcagagcaatctccgggaagaatgtaagcagtgccggaatcttatcggatactacttctgttggatgataatgtccgttgtccatcagtggcagacatttgtctttgttcattgcagcgtagctcagtgagaattcagctgaccctactgtataagcctcaacaccgataccgaatactttagactctacacaaggttttacaaggtttgtgtcaaatggctcggaaaggattgcatcgatagactctttgtagcgtacacgaggtcccatacggtcagccggaatatctttgaatccgtcacctgtccagatattcattacacaaggaactcctgtctgctccgcaaaatactgtgaaatgcggatgcaggcttttccatgctcgatccagaagtttcttacttcctcatccgggcttgaaagtgtaagtccgtcttttaccattggatgtgagaagaatgttggattaaaatcaagtcccattcctctttcttttgcaaaatcaacccatttctggaaatgttttggctctaatttatcacgatctacgaattcaccatcttcaaagattgcgtagcatgcatgaacattgattttctttttacccggcatcaggctcattgccttatccatatcagctaacagttcttccggagttcttgcttttcccggatagtttcctgttgtctggattcctcctgtcagagggccgtcgtggtcaaatcctgttacatcatctccctgccagcagtgaagagaaaccggaatttctttacattttgcgattgctgcgtctgtgtccactcctaattttgcatagatttctttggctgattcatatcttgtcatcttttcttcctccatttttgtgaatttgaattacgcattttcgtatatttttacatcaaacgattttccaacacatgttcttgcttccggcaggtctttaaatactccatcatgtagcatctggacaacaatatttccgattgctgtagcttcagaaggccctgcagaaactttttttcctgtatattttgctgtcagttcgttaagatatcctgcattggcaccgccaccgacaacatagattgtagtgtatttttttcctgttaatgcttcaatctcttcgatcgtatcgccataacattttgcaagactgttgtagataactgctgcgatctcgcccactgtttcaggcacctgctgcttggaatcacggcagaacttcttcacagcttcaatcatgctcttcggagcaaggaagcagtcatcattacagtctactaaagatgtgatcgtctctttggaagctctctcacaaatctctgcaaaagaaagatcctctgtgaattctttctttacagactggatcatccagagtcccatgatatttttcaggtaacggaaacggtgatcgtatccaccttcgtttgtgaagtttgcctgcatacttctcagtgagcagtccgcttcttttctctcaattcccatcaaagaccatgtgccggagctgatataaatggcattgtcatcgttggttggtaccgcaagtaccgctgagcctgtatcatgagtggctggaagaacaaccttacagttgaatccaacctcgttctgaatgtcctgcgtaaattcgcctacaactgttcccggcatagataccggctggaacatctctttgttgtatccgagcatatcgatcagttcataatcccagtcatttgtcgtcggattcacaagctgtcctgttgtcgcatttgtatattcatttttcttcacacctgtcagcaggaaatggaagtaatccggaatcatcaggattgcttttgcctgttcaaggtactccggatgagtctcttttacagccatcagctgatagattgtattgaatatctgcttctggatacctgttctctcatacaatgcggaaagggaaatcttttcatacactttctcatccattccattcgtacgactgtcacgatagcctactgtatctccgaggatctgatccttctcatcaagaagcacatagtcaactccccaagtatcaattcccattgttgccggtatctttccaagttctttacatttcttcaatccgttcttgatttctgtaaaaagacgatctacatcccagcataaagtaccgtttttgttatccattccatttggaaaacggtaaacctcttccagtttcatctttccatcttccatggatgccagcatatgacgtccactggatgctccgatatcaactgccagataataattgcccattgtttggtgcctccttgttatttttctattactgttcatttcttatgactttattatacccacgctttttatgtaaaaaaaggacgctatttacgaaaaacagcgtccttatttgcattatattttgtttttagggttctcttttgcaccttgtacaattttcaattactatttttgttgaaaatgtatatcttcatttcaaatgtaattctccacaaccagatactttatttaccggagaaatttctatgaagaagctcatgctcttttcccttcaacaaagtatcgtacaaggaaagaatcattgggttctcatttgatttcttgatctgagtgtttacatctgtatcatataagcccttcattcttgcttttctggttctcggtcctgcattcaccggctgacctccacccatgatacatcctctgcggcaggccatcacttccacaaaatcatactctgcttcgtgattttttatctgctgcaatactttatctgcatttgcaaggccatttacaactgctgccttaatctctcttccattataattataagtcagcactttaataccgtcgtccccacgcacaccactctttttaatagactccatgtctactctgttgtgtccctgctgcagcctacggagcactgcctctgtaacaccaccggtaacaccgaagatcacaccacttccggagccgataccaaacggtacatcagctgcttcgatctcaactttgtcaaatacaattcctgatttgcggatcattcttacgatttctgttgttgtgagcacgtaatcaacatcctgcttgccatttgtataagattccggacgtaagatttcttccttcttcgccgtacaaggcataattgatacagatacgattttctttccttcatttttctcaggatctttataatactctcttacaactgctccaaacatctgctgcggtgatctgcatgttgaaagattcggcacgaattccggatatttattctcacaatattttacccatgccggacaacaggatgtaaagagtggcatcttctcaccggaagtaaatctctcaataaactctttggattcctccacaactgtcaggtctgcgccataggatgtgtcatatacttcatcaaatcccagacgatgcagtactcctactaacttacccattacattttcgcctttggcataaccaaaattatcaccgattgcaacacgtacagccggagcgatctgagcaatcacctttgtattcttgtctgccaaagcttcccacacttcatcaatattggtatgaatactgattgcaccggtcggacagacaacacgacactgtccacaacctacgcagtctgtttctgcaatcttcttattaaatgccggtattacctgtgcatcagttccacgatacgcgaagtcgattgcattgatattctgtacattatcacacattctgacacagtcaccacacaggatacatttattcggatctctgataattgcatgtgaacttgtatcaattggctgtatctctcttacattttcaaagcggatctcatgaactcccatacggtgagccagttcctgcagatgacactcgccgctcttgatacacgtcgtacaatccctgcagtgagcagccagaagtagttccagtatcagtttccggtagcgcatcagccttggtgtatttgtataaataatcattccgtctctcggcttttctgaacatgaggcaaatgttttccctctgtcatcttctaccgtgcataatcggcaggcaccatagatagataattccgaatgataacacaaggtagggatatcaatcccggcttttcttattacagacaatacattaggttcatccgtgaactcaatggcctgtccgtcaattgtcataattcccataaatctctatcctccctactctgtataaacagctccaaatgggcagttatcgatacaacttccacacttgatgcactttgaattatcaattgtaaatggtgattttatttttcctgtgattgcatttaccggacagttcttcgcacatttcgaacatcctttgcatttctccggatcaatcttaaacacacgaagattagaacagactcccgcacgacatttcttatctattatgtgctcttcatattcttttcggaatgcatgaatcgtacttacaaccggctttggtgcactctttccaagaccacataaggcagtattttcaatcatgtccgccagttcttccagttcatcaaggtcgctcatttctccgtttccggcaactatacgttccagaatctccagcatacgcttagttccttctctgcacggaacgcattttccacagctttctctctgtgtgaagttcataaagaatcttgcaacctctaccatacaggtgtcttcatccataacaacaagtccaccggaaccgatcatggcaccgatctttgacagtgagtcaaaatccatcttactgtcaagctgggattctaccagacatccaccggatggaccaccgatctgaactgccttgaaccctttatcgtccttgatgccgcctccgatatcaaagatgatttcacgtaaacttattcccataggcacttcgatcaatccggtattttttacatttccggtaagggcaaacgctttcgttcctgggctttgcggtgtaccgatacggctgtaccagtctgctccgtttttaatgatcatcgggatatttgcataagtctctacgttattcaatacggttggcttctcccataatccctgttctactgttctcggtggttttactctcggcatgcctcgcttgccttcgatcgaagctgtaagcgcggaaccttccccacatacaaaagcacctgctccgcgattgatatgtaatttgaagctgaatcctgttccaaggatattatctcccaaaagtcctttctcttccgcctgagcgatagcgatctgcagtcttcgtactgccagcggatactctgcacgaacgtaaatatatccttcctgggcctgtactgcataagctgccagcatcatcccttcaatcattcggtgaggatcaccttccataacgcttcgatccataaatgcacccggatctccttcatcaccattgcagactacataacggatcttttccggctgactcgctacctgtgaccattttcttcccgccggaaatcctgctccgcctcttccacgaagacctgcatctgtaaccgtcttaatcactgcttccggagtcatttcaaacacagctttttcgaaagactcatatgctcctaccgccattgcatcttcaatatgctctgcatcaatatgaccgcagtttctcaacaccagacgggtctgcttggcatagaatggaatttcttcctgtgtctgatatacatgaccattatcttcatacatcaatcttgtaaccggttctccatgaagaatcgtcttttcaaaaatttcttcgcagtcttccagttttactttcagatacagatagttataaggttcaatacgaaccagcggacccatctcacagaatccatggcatccgctcatcttaagtcccacatgagcgatttcttcaccgattttgactgttacatgatccatattggaagttagttctttcaaacgggcatatattttatctgaaccacctgccagacatcctgttcctccacagaccagaatacagcagttttctttctgccgcttttccttacactcttctctccataactggagctgcattctgttttctatcctcattcctcttcctcccgcagcttcttgatcagctcgctcattttctcaggtgtcattttcggatgtacttcatcattgaccattacggccggtgccagtccacatgcgcccaagcatgaaaccgtctctactgtaaacaactggtcatctgttgtgtgtttcttttttccaagccccagttccttgtaaagtccttccagaatcggaatagatttgcgcacatgacaggctgttccatcacatacttttatcacatattttccttttgcctcaaaagaaaaattttcataaaagcttgccacactgtaagctttcgcctcggagattcccagtttctccgcaacataagttaaaagctccggtggaagatagcgatattcttcctgaatcccctgtataatcgggatcaaagacttttcttcacatgtatactgtgcaataatctcatctgttttttcgtaataggatatatctaacattgtgcccctcctttttttgtatttttcacatatgtttcattatacatcctatcttcttttatgcatagtgctattttgatgttattttcacgattttatttcgtcgtttttttatttttatctgttttcttgcgttgttattgatgcaaattgccggtttttatatcaatatagtcttcggtttactattcgcgtaaaaaaagaagatgccatctgtgaaaaatagcatcctctctatactttatccttaattcatgttttcaatccgatattctttcggactgattccgtagcgttctttaaattttctataaaaatagcttgtattgtcgtatccaactgcttctataatatccgacaccgcaatcctgctgtttatcagaagatacactgcctgctgcatcctcttttcctgaagaagttctttatatgttttccctgatttcttcttaatctcacgactcagccaatagacatccactttcatctctaccgccagttctgacagcgtgccttctttaaaatgatcctcaatatagcgatacacattcgccataatctctgtatcaaatttgcgtccgccggcttccatcttatccatataattcaacaactgaagaaacaaaagtcccatcgtgatctgattactgcttcgcttattggaaatgtcatagaagattgtccagaccatattctcgatcagattctgcaccgggagaatatcagccacatgaaaatacagataagacgtctcttcatctcttccgcacaacgccccgacaaggaaatctttcagctgattttcttctgccccgatcatagagaatgctgtgttaaaaaactccggcaggacaataaagttcactgcaatatcatactctccggccggaaggatctcctgcactgcattctgattcagaaacagaaggtcaccctgttcgagcacaacctgattgccgttcacgatatgtgtcgttgttccctggcacatataaattacttctatataattgtgtgtatgcgccgggaaatgtacaaagcgagtatgcggtctgacctggatcaacttccccttcttcagaagtttcgcactgtccacaaccatttccttcttttctgtataaagctgtggatcgatctcctgttttccttcaaggatccggcgttcctcatctgtgatcatcgccagttcccggatcagttcctgatgcatctattgcctgcctttctggtttatccttttaatgtagctgcaatctctctcgttaattccatgtactctttcgcacttctactgctcttcttatatgcgatcaccggtgcattattatcctgcgaccactcaattccactgtccacgcggatgtaagtatcaaatactttcacatcatctaactcttgcagagtctctaatgtctgtttgaaataattctttcttgtatcaacctttgtgatcacaattccaccaagcttgagatccggtgcaatttcttctacactgtccaggaattcaaacatatttccaagaccaaacagtccccatggagatgcctctaccggaaggatcacataatcggacgcacacagaatattcatcacccatccaccaagtgtcggcggtgcatcgatcagaatataatcataaacctctgactcgcggatcttcttcaatccttttttcaaaatatactctctctgccattttgtaaaaagttcgtattcaatcgaactcatcaatgtagaagacggaatcagatcaagtccttcgtattttgtattcacgatataatctgtcagatcatcctgtcgcttgattgcttcatacaaatttttgtcactctgtgcatatgcaagcactgtatcttcgtcaaacaaagaaagggagagattcagctgcatatctccgtcgatcatcagaaccttttttccaagctctctcaaaccaaatccaacatttgaacaagttgtggtctttccgcttcctcccttattattcgtaaaacagattacctttgtctttgccattgtgttctctccttcttccgaaatcatcaaatctatcctaattactgtatccagtaacgcccttttctaaaattttagcatatccatttacgaaagacaatgaaatccaatccattttatgttatagttattgtatccgagtaatcattagaattttatcatgatcactctccaaatcagccgcttatttaatagctcagaaagactgaggttttcttttatgaataaaaaatccatactgatcaccggttcttcccgcggcatcgggcgtgcctgtgcgaaagcatacgccaaggccggttatcacgtatttctcaactgtgtccaccaggtggaacgcttagaagagctcgcacatgagattctctcaaacggtggttcctgtacagcagttcccggagatgtcagtaaccccgacgaagtccggaagatttttcagattattgaaaaagagtgtggtggcgttgatattctgatcaacaatgccggtatcgcctggttcggacttctgactgacatgactgacaatgactgggataagattcttgccacgaatctttcttccgtcttctactgcagccgcgcagccattccatacatggtatctaaaaaatgtggaaagattctgaatatttcttctatgtggggaactgtcggtgcttcctgtgaagttgcttattccgcaacaaaatccggaatacacggattgacacgagcacttgccaaggaacttgcaccgagtaatattcaggtgaatgcaatcgcctgcggtgtgattgacacagaaatgaatggtcgtttgaacgaagaggaacgccaagatcttatggatgagattccttccggacgttttgccgatccggaggaagttgccgagcttgcattaaagctcacagatacgccggcttatatgaccggacagattattggaatagatggaggattcatatgatagacgtacatcacattgaacagatttcacaggattgttcccttactgaattcgttggaacaaccgttttggatacaatcggacttgttatcccgggaattgacccttctcttcttgagaagatgaatctgaagaaggcatataagagtctcggcctgatcagttcaagaacaggtgcagccggacagatcaatgcagcagacgaagctgtcaagtcaacgaacacggagattgtctctattgagcttcctcgtgatacaaaaggctggggcgggcatggatgttttatcgtgattggcggagacaatgtctctgacgtgcgccgtgcggttgacattgcacttgaatatatcggcaaatatgccggtgagctctacatcagccaggccggacatctggagttcactttctctgcctgtgctgacaaagcacttcatatggcattcaacgccccgattggaaaaccatttggattcttctgcggttcccctgctgctattggacttgtcatggctgaccttgcggtgaagtcttccccggttgaagtcatcaagtatatgaccccggaccagggaacaagccattcgaacgaagtgatcgtcgcggtaaccggtgattcggatgctgttaagaatgcagtcctcactgcaagagatgtaggtcttcagctgcttgtctccatgggaagttaccctgagagcccggcaacaccgtatctacagtaggatataactttacagaaacaccatataatatcacacgcaattccaagaacagttttcccactgttcttataagaaaaaaaccgtaagatgaagctcatttcctgcttcctcttacggttttgttatctatctatttttcttattctataacattagaattccagacacatttataatctcccataaatatcctgcggcacatatgccttaacctcaattccttccggcacatattcttcggataacagctgccccttactgcggatcagctgaatcttgcccgcttcactgaaatcatataagcgttcaatataaatctgctctttacggataatctccaataacgcctgtttaaactcttccagcccctgcccggtcttcgcagatgtcgcaatggaataatctgcctgaagatctttgtgattaaccggattctcaaccttatcttgcttgttaaacagtgtaatgaccggttttccttcggctccaagctgtctgagtgtctcataaactacatgcatctgtgcatccatctgtggattcgaagcatcaactacgtgtacgataatatccgcatactttgcttcttccagtgtgctcttaaatgcctctaccaaatgatgcggcagcttgttgataaatccaaccgtatctgtcaaaagaatttcctgtgtgttatccagtgtcaaagctctcgttgttgtatccaatgttgagaaaagcatcgcatcctccaatactcctgcctgtgtcagtgcattctcaatactgctctttcctgctgaagtataacccactaatgctgctactttcagtccggactgctttctctgtccacgaatcaattctctgtggcgctctacatctttcaattctttcttcagtctgctgatacgttctctgatcagacggcggtccatctccagttttttctctcccggtcctcttgttccgattcctcctccaagtctggaaagtgattttccaagtccggccagtcttgaagcacggtactttaactgtgctaattctacctggatcttaccttctcctgacactgctctggctgcaaatatatcaagaatcagaagtgttctgtccatgattttacaatccaattctgcttccagattccccatctgcacacttgtcaactcgtcatcacagataattcctgttccgtgcgtctcccacaataattcctttaattccagaatttttccttttcctatataagttcccggatggatattttctcttggctggatcatacgaccgacaacttctgcacctgctgtcttcgcaagctctccaagctcatccagggatcgttctgcctgatcagatccatccgtatctaccgcaacgagaattaccctctcttttatttcatccattgatatcatattttcttttccttatctacttatcatgatctgctaatatgcaatctgccctgctactgaacgcagtaacctttttatcttgtctgaaggaactctgcttccttactcacagaatcatcttccgggaaatcttcctgatactgtttcatcgcactctttgcattttcccagtctgcctgttgttcgtagcagacaatcacattatattccatttcttgaagaagtactgtatctgctttcgttttgtcatctcctgtcttgctttctgcaagtgcgattccagcctggaaacattcaagtgccttcgcataatcttccgtcttcattgcgcaaactgcggtcagattataaagttcctgcgtctgctctgctccctgatccaatgcggtctgaaatgcttccaatgccttgtcatactctttctgctcgtaataagtcatcccaagtccctgatatccatctgccgcaacttctttattctcattcttagttgcctcttcaaatgccgtctctgccgcatcatatcttccttcaccaagcgcctctgttccgtccttgaccacatttccacagccggatgctaaacaagtcacaccagccaacatcaaaactgccagtttttttcttatcatcatctattttcctcatctttctatgctaaatatctttcatattttccattcttctattgctatagtataccgaacctatagaaaatcatcaagccccatcgccaaaggcgatttgaaataacgagatgcgtttctggtcgcacatcgtgtaaacagtaacacaatcacttttaacaacaagagctgtgaaaatatgaatctctcattttccacagctcacttcgtttattacagttttatattttctacagattactgtcttatgttacaatctctgtcactttttcctgtactttcgaatctttatattctttgttatttccaagaacatctctgcacacatcattcatcagttcttcattcatccgaatctgatccttatcctgttgggcaatgcattcctgaattgcctcattcaatgaaagcatcttatcatccagctctgataccatctttgcgcattcctgcagatccttgctgatatactccggtgcattcccttcaaatttgtagtagatcttatgttcaaggcttgcccagaagtccattgcaatggttcggatctgaatctcaaccttcgtgtctactacactatccgaaaggaatatcggcacagaaactaacatatgataacttttatatccactttctttgggattcttaatataatccttaattgaaagaactttcaaatcgctttggtttcctatcatctctgccagacgatatatgtctgatgtaaatgaacagatcaatcttactcctgcaatatcattcacatagcgaaccatgttctctatggacgtctcatgtccatacctcttcaactttttcacaatactatccggtgtcttgatccttgtcttaatatgttcaatcggattatactgatgtacatgctgaaattcatcattaagaatctccagctttgtaccaacttctttcaacgctgcattatacaggaaaatgattgtcttccagctgtcaacatcttcataactctttagcgcagcttctacctgttgttcacttctcatagcagtcatcccccggtctgtttatatatattaagtataacatactcccctttttctgtcacagaattcacttcttttttagagatattttagtgttactgtaatagtatctttctaatctctgtaatccattttctgcctacagctccagtttcatgtctccctggcgaatccagcccttctttctcataaattccgaaattccaagtgtgatcactgccggaagtacaaactggatcacaatgatcttcaccagaacaaccatcggatcttctgtctggatcatcacctgccacgtcatcaacggaccaaccagcccggctgttcccattccagatccggttgcattattcgtcatatggagtaacattgtacttaccggtcctaaaattgcgcttgacaaaatggatgggatccaaatcaatggatgtctcataatattcggtacctgaagcatagaagtaccaattccctgtgccaaaaatccaccaatcttattctctctgtagcttgcaactgcaaatccaatcatattgcaacaacatccaactgtagctgctccagctgcaagacctgacagattcaggattacccccaaagccgcggagctgatcggcaatgtcaggatcattcccatcaagaccgaaactacaattcccataaggaacggctgctgttctgttccccagttaatcaaagaacccagccagttcataaaggaagaaatcggtggtccgacaaacaatccaacaactccaccaacaccaatgcagatcaatggtgtcaggataatatctagttttgttcttcctgtaactaaaattccaatctcaattgccacataagctgccacgaaagctcccagtggttcccccggtccggctaatacaatattcccatctacaagcacctgacctgccagaattttccccgcgaatgctccgatcataccgacaacagctgcacaaactgtaacaagctgctgagcctccagcttccttgccactccgacaccaatacctgctcctgtaagcgctgcagcaactttcccgatcaaataaattaaatctccataatttcctccaacaaacattcctatctgctgaatgattgttcctatgatcaatgttgcaaacaagccctgcgccattccgctgagtccgtcaataaatattctcttcatcgctcttctagtcctccttatacaggacgccccattcctgtccttccttcttccgggtgtccctcttcaacgcattgccttcctcatcacaaagctccgggatctgatctacggtatccatccggtagtctgtcagaagccagcttacaatattcacattatcctttcgtccaatcaccatctccggcacaagcacagagagcatctgctccaagaaatcaatttccacctggttctctttcgaataaagcagtacatttttgtaaatcataagataaacacctttgcactgttcttcttcaatatccatataaacggactggaatttctgttcaaatccaaattcatcaatcagatgaaagattgcctgtccataactgtcttcttccagataacctcccagcatttctctgtctgtctctgtacattctctaatcataactgctctccaatcattctatcaattactatattgctgttaccattaccgtgttactgttcacacgatgtgcgaccagcaacgcatctcgccattttaaatcgcctttggcgatggggcgagatgcattcaagtcaaaacacgcatcctccgtgtcaatcagcggagtgattgacactggagtgaacagtaacattaccgttccactataccaaaaagtctctaaaaaagaaatgactttttgtttttcttatgttaggatacaagagacaggtattttcagaagatcagatagtttcttctgctgccggaaaggagtctattatgtttcgtttatggggaaaagaatttaaagacaaccgcatgctttgcgatactgttatctgcgatgagacagacgacacacgtacacataagatctttcatgcactcgataagatctgctatgaatttgatctgagcaagccaatctggctcgactcaacgatcaatgagttcaagcgccacgccaaagcgcgtttctatcaggacaattttgtcgatgagattgactttgactatctggagattcagattattgaagaataacactcggtagcgtacaaaagatagattgaaaacagcttctaaaatccgcttcaaatttttttgaaaaaaattcaaaattagtgttgacattttccaatatccgttatataatcttttttgttgtgagcgatacaacagagcaaacaacaaaatgtgcgattagctcagctggatagagcgtctgactacggatcagaaggccgggagttcgaatcttctatcgcacgctatagagactgtaaggaaatttccttacagtctttttgtatctttggaaaatctcacttcaaaggatcctctccgaacagacgcccaaaaatttacccaaaaccaagcaaaggcggtgccagattcaagttcacatataagcaaactcaaatttgcaccgcctgtcctgattcaaaactacattataactattccaacaacactctattttgaaaatctctctgcctgcgcctcaatcagtgccttgtcatcaaaataattgatcttcatagcatcttttacttccttcaatgtctgtgctgcaacagcctctgccttctcgcttccctttttaagaatctcgtagattgcaggaatgtctttctgaagttcttttcttctgttgcggattggctccagttctgcctgaagaacattgttcaggaatctcttcactttcatatctccaagtccgcctctctgataatgtgctttcagctcatccagattctgatattctggcaggaattccgcaaaatactctggtttacagaatgcatccagatatgtgaatacagtatttccttccagacttcccggatcttccacacggatatgattcggatcagtaaacatgctgaatactttcttcttaatatcttctgattcctctgacagataaatacagttgcccagagacttactcatcttcgccttaccgtcaattcccgggagacgaaggcatgcttcattctccggaagaagaatcttcggatcgatcagggtatctccataaacggaattaaatttgtgtacaatctcctttgtctgctcaagcatcgggagctgatcttctcctaccggtacaacagtagccttgaatgctgtaatatctgctgcctgactgatcggatatgtgaagaatccaaccgggatacttgcctcaaaatttctcatcttgatctcattctttacagtaggatttctctgcagtcttgagactgtcacaagattcatgtaatagaatgataactctgtcagttccggtacctgtgactggataaacagagtagacttctccggatccaatccacaagccatgtagtctaatgctacttcgataatattctgacgtaccttttccgggttatcagcattatcagtcaatgcctgtgcatctgcgatcataataaaaatgtcatcaaaatctcctgtattctgtaattcaacacgacgacgcagggaacccacataatgtcctacgtgtaatcttcctgtcggtctgtcaccagtaagcataaccttcttcatgctctagtcctcctaaatctcatgtaatactttattcgtaactgtcaggctaatctgcccacagtaattcactggcttttattataacatttccccagatgcttttctatagaaacttctgtatattaggaaaggactttcctaatatacaaaaaagtgcccttgacctcatcagccaaaagcacttcctgtaattctttttctaactcttacttattctgaaataccggacgctttgaatatcccggaactttcttcgtctcttctgcatatacccactgatacaacagataagccataataaatgctcctgtcacatcaagtacagaatgctgcttcaagaacatagtcgccattatgatcaacgctccaagcacatatgctccaatacaaacagctttgtgtttcttaagtgcctgactcttatggattgcaatacatgcgcacagagtattaaacacatgaagacttggaaatacattcgtacaagtatctgtccgatacagcattcgaactgcatctacaaaaatattatcccgctcaaacacaaccggtcgtaaatcctgaccattcggaaatacggaacaaataataaggaaaattgtcattcctgcaaacgaaatcttcgccagtttgtaaaatccctgtacatctgtaacgaaaaagtataaaaatgtagctgcgataaatacaaaccataacatatacggtacaataaaatattcaataaaaggaatctcttcatctaatgctgtctgcaccacatgataattcatcgtcacatgtttctcaagaaacaaaaaccacggcatatagattaacgcgtataaaaacacccatgcatgcttatatctttttattgtctctatgaactttgtcttccatttcatatctgacactcctccgcttttcatcaaaccgatacagcacttgctacttctgcgctattttcatttaacgctcttttttgataggctcgattatagcacttttaaaacacaatctcaaccgacttcataagtttttaacatttcttttctttttcttatgaattatcaacatctgtctcttcttttgttcacctttactttttaaatcagcactttcaatagaaatcagatttactcttctttaactcatctcaaaaatatacatatcgaagcttcttcttgccgccttaacatccttttctccatgcagtgtccatgccgctgccggcgttttaaagagaaccctgttcaaccataatcccggattctttctgtccgaccaccggtaagaaataaaatccggtctgcacatacagttactcaaaagatattttacacaaaatctcaagagataatgcgttgttctgtcgtttttcgtcagattctcagataattgtcctcttgggatttcattccgatatttcttcatccaacgaagtaccaggctgttaaaggattggatcatgtattcgccatgatattttcgcagttcttcatccaattttctgcaaatctttgtatctgtgttaggaagtttcacctcgatcagaagtggtacctttccatctaccaactgcagtacttctgacaatagtggaatccgctcttttgtctccgcaagtctatacttctgcatctcttcatatgaagtatcttccactctgccccgtcttccacagattctttcaaatgtatcatcatgaaaaaccaccaactgtccatcctttgtcagatgaacatccagttctattccatctccggcttcgattgccgcacgaaatgccggaaatgaattttccggaatcccacgcttcttatcatgaagtcctctatgcgcccactttacgccaagaaacggatgcactctttttctgcccgacagtcttggagccagcaaaaaaattaagaaagctggtattcctattacaatacataacccaattgctaaaacaatccctatatgcatcctgtttcatcacctttcttctattcaacgatcacattaagtttttctttttccagtgagacttctatctcttttgataaaaaggaaggttctccatctgtatgtaacggcagtgcacgatctgtcactacctttacactacgacattttaatatcgtcacccctttaaatcttgtatgctttcctgaaaaagcggtcggaagcagacacagaatcttgagcttcgacagatccgacacaaccataatatcaagaaatccatcacttccggaagcgtccggacaaaacttaaagcctcctccttcataaggaagattcataaatgctgcaaaataagtcctctcaaacactttcatgcttccatcatccagtgtcagttcaagtttcaccggccgatcctttataatacgattcattgccacaaccgcataactcagcttaccgattttcagaaggttcaatacacgtttccattttgaaacacatacttcatgacaaactgcagcatcaaatccaatgccggcactcactgcaaatcttcttcctttcccttccctttttagcacacctatatccatcttttcaacccttttgggtgaaagaattgtgtccaatgcttcaaaaggatctcccggaattcctgttcctcttgcaaaatcattgcttgatccaatcggaatatatcccaacgtcactttctccagtgatttaattccgcttagtacttcattgagtgtaccgtcgcctccaagaacaacaagcatgtgctcctggccatcttccgtaatctctgatgcaatctttcctgcatcctttttctttgttgtcagatgaatctgataatcgattctttttctgcacaactcaggttccagctgtttccacagcatctcgccaagccctgaacgagcccgcggattcacaataaagtgataaatcatcaaccttcctccagtgtactgtccagataccgccttaaagaacgactcatgttgccctcgaaatcagcatttccctctctcagacaccattcaaatacatttccgatcacgatcatccggatatctgttgtaaattcgtcaatactctctctaatgttaataatcccatccttcgcagcctgctctacataagcctgcactgtcacgatcggatatggacgttctgttcttatcgccggattcaatgcctgattctttgtatcataataccctgccataaattctacaccaagctcacggcaataagctacataattcaaataaacacggacaattccgtcctttacatcttccagacttttcggtgtctccagcagatccggtcccatcgtaggctggtcttctatataataagacagcaaatcatcttttgtcttaaagtgatgatagaaacttccgttcgacactcctgcttcttcacagatattcttgattgacaatttttcatatccgctcttctgaagaatcttcttcgctgcctgaaagattttttcctttgtttcctgtgattttttctgctgcttcgataattctatttttgtactcatttctgctaaaactctcccgtatgcattttaaactataagagatattataacatatttcgccctttttttcaataaaacagagtggactctattttaagcgttctatttttattttccagatttttcagctaccacagtattctcatcctcttcatttatagatatgcagaaaatgcactcggaattgcataatttttctccagatccttctttcctgcaaatatgatctcaggattctgaaattctttttccaactcatccaccaaaatctcatatccggtcatatgccattccacatgactgaaaatgtgcttcgcctttggcagcttcttcacgcgcaccggcgtaagacctgactcttttgcatattctataacttctttttgtgttaaatgtccctctacattaggaaattcatacaatcctgcaaggagtccttttcccggccttttgcgaatcgcaatttcctcattatcacaaaatcttagaatcgttcttttctcgattcttcgctctttcgcctttttcttgaccggatagtccatctgacattcatcctggtatgcaagacaaaatttccttatcggacagctctcacaccttggttctccatttggcagacagacgattgccccaagttcgatcaatccttgattaaaatctcccggtgcctctgccggaatcacctgttcaagcatacgttctatctttgtccttgtacttgctttcataatgtcatcactgtcttccagaattctcgtaaccacgcgaaaaacattgccatctaccgctggtttctgctgatgataaacaaaagagctaatcgcaccggctgtataactgccaattcccttcaacttttttatctcttcaaatgtatccgggaatacaccattatattctttcattacctgttgtgctgctgtctttaaattcctcgccctgttgtagtagccaagtccttcccacagcttaagcagtctgtcttccggcacttcagccagcgctttgatatccggcagttcttccaggaatcgtgtgtaataagatttaactgcttccactctcgtctgctgcagcataatctctgaaatccagacccgatacgcattcacatgcttccgccacggaagatctctctgattctcccgaaaccattcaacaagtggttctaccatatcatgtaatctctcacattccccaaattctactttgcaattttccttttcattacatttcattcaatacgatttccttatatgacttttctaatataaataatattttctaatatataaaaatatctgttcaatattgtaacacaataccaaacagatattctatagattaaaattaaatattttttcgtaactgttcagagccaacctccaaaatgctacgcattttcttttacaggatctttgaaaggaactcctgaagtcttggatctttcggatgttcaaagaattctgccggggcagcttcttccttaatctgaccgtcatcaatgaaaagaactcttgaagcaacctcacgggcaaatcccatctcatgagtaacaacaaccattgtcattccctcttttgccagatctttcatcagttcaagtacttctcctaccatttccggatcaagtgctgaagtcggctcatcaaaaagaattacatcaggattcatagccatggaacggataatcgcgacacgctgtttctgtccaccggaaagtgtagacggatacacatccgctttatcttccaatccgattctcttcaaaagagccattgcctgctcctttacttctttcttgatctgctcctttgtctcagtgatcggaatcagttcttccttcttgtcacttccacggaacatatttttaaatttgatcatacgattctttttctttgccttatcaatgtccttacattttagatatgcaggtgccatcatgacattctgaagaactgtcttattattataaagattgaaatgctggaaaaccattcccatatggcggcgatgctgattaatatcaaccttcatatctgcgatatcaacaccattgaagataatacttccgcctgtcgggtcttccatacagttcaagcatcgtaaaaatgtacttttaccagagccggatggtccgagcaccgcaacgatatcgcctttattgatcgtaacattgattcccttcagaatctctttgtccccaaagcttttttgcagattaattacgtctatcactcttcttcaggctcctttctaataatttaacaagtaatgtgatcacaagcacaagtgctatgtagattaacgccattacaaggtacggtaccatgaattcgtagctgttacttccgatatagttaaatgcaacataaaggtcagctgcgccaacaaaacttactacagatgtctctttaataagagaaatgaactcatttccaagtgtcggaagaatgttctttacagcctgcggaatcacaatcttcatcatacttgttccaaaactgagtccgactgctcttccggcttccatctgtcccggatcgacagactggattccgcttcgcatgatctctgaaatatatgcaccactattcagaccaaatacaaccatagaaacctgtactccggtaatcttcaccccaaaaatcggaaggagtacataataaaagataaggagctgaactaccataggagttcctctgaataatgcaacgtaaaagctgcaaatatgattcaatactctcggaagagttttatatttcggaatcacacggactgtagcgatcaaagtaccaatcacaataccgataatcagaccgcagattgcgatcagcaaagtattgtgcagtccctgaactactttcacatagccattctgattcagaaatatatcaataaatttgtctactttctgactaaaattccccatttgtttcctttctccaaaaagaggaaaatgcatgcatcatcttctgcctgtatttccctcgttaataaattctgttattttactgcctgtaaattcttagtaaatactcttactgaactgcgttgattgcatctgtgattgctgctgccggtgctgcatcaatgatcacatactgaatatttccattgagcatatcctgtactgcaagtgatccgctcttgtatgtcacacattttgccggaagtcccgggaagtcccaatcttcgcttccttcaacatagtactgacctgttgttccctgctgaacaccaatctggtcagatgattttgtctcagcaagcttagctgcaacgtcatctgctgtcttgcaatcatcgaatgttgtaacattgcttggaacgatcaaacgctgggatgctgaatagtaagaatctgtaaatgtaacatattcttctctctcttcattgattgtaagtcctgccatagcaatatcacatttctgctggcttacagacagacaaactgcatcaaaatccatgttctcgattacaagttcttttccaagttcatcagcaagaagctttgcgatctccatatcgattccataataatcttcaccctttgtatactcaaatggctcgaatgctgcatttgtagctacaaccaactgatccttagatgtatcaagtgttgctgattttactgcttccggctctccgtctgagaaatattttttgcagatctcatcaagtgttccatctgatttgatctttgcaataaactcatttgtcttctcaagaagttccggctgattcttgtccacaccaaatgcatattcttcatttgtaaggtcaatatcgattacctttgctgttactgtttcgttcttactaccacaacctgccagcatgctgactgctaatgctgcagtaagaaatactgataaaaacttcttcatcttaagctcctcctcttttttctgcataaaaattcaaaacatgttaataattataacatgcttttcataaaatgcaagacgtaattatgcacgatttcttttggaaatacaaaattttactgttcacaataactgtgaacagtaaaacacactgcactctattcaataatacatatcttatttgaataaagcctggataccgaagaataaaaatacaacgattccaagtacgattctgtaatatccaaatgccttaaagtcatggttcttgatatatttcatcaggaacttgatcgctataacagatactgcaaaggatacgatcattccaagaagaagcagaaatacctgcattggggtaaatgccagaccgaacttaaacaacttcagtgcacttgctccaaacataaccggaattgcaaggaaaaatgtaaactctgctgcaacacttcttgaaaccccaagtgccagtgctccgacaatcgttgcgccggatctggacgtcccagggatcatcgccatcatctggaaaactccgatcagaagaactgtcttcacagaaagctgagagattctttttactttcggttctcttgtctcattacgtttttcaattacaatgaataaaataccataaacaatcaacatcaatgcaacaacatatgcattactcagttttgattcaatcagattgttcagcaacactcctccgatcagtgccggaattgttccgatcactactttaatccataactgaattgtcatcttcttctgcttttccgtcttcgtcggtgagaacggatttaacttatgaaaataaattactacaactgccaggatcgatccaaactgaatcaccacattgaacatattcgtaaatgcctcgctctgcttcagttggatcagctgctctaccagaatcagatgacctgtactactgattggaagccactctgtgattccctgcacaattcctaaaatgataacctttaatacttctaacatgattcccctcctcatttcagaacaaacttctcgatggcctttgcaaccccctcatcattgttgctctccgtaatataatcagctacagctttgaccttttcttcggcattcgccatggcaaccccaaatccaacttccttgagcattgcgatatcattatcgccatccccacacgccatgatctcttcccgcctgattccaagcatcttgccaagattcacaagtccggttcccttatttacaccaactgcattgatttctatattatattgaagagagccaaccagttcaaagacgccttctcgctccagctctttccatgcctcttctctctcttccatatctgcaaacaacatctgtactttatcaagattcccttctttttcatccagcagatcttccaggctgtctaccgctattcgtgttctcagaaaataatcccacatgttcggattcttatgatactttctcacctgcgcgatctcatctttctgagcatatccctgcccatcaaaataaacttccaacagagtatcatattttcttccgattgcaattgctttttttgctacttctttggataacagatgttcttccagtacctttccggttctcgtctcgataatccttgccccattcgcagtcagtgcataatccatccccggaagctcacgtaattcttccggaactcctgtccatggtcttccggttgcaacaagaacaactgtaccattctgcagtgcctctctgatcacattcttcgtataaggaagaagttccttcttatctgtaagaagtgttccatcgagatctaatccaacaatcttaatttccttttttttcatacttttttccttatcttctgtattttctatctgtcaattgttacaaaaagcaatatctttttaattattttgtaaaacaatcataaaatatttcgtgccaatttgattaattctctgttttatagtataataggttttcaacaactatgcaatgtcatttaaagaaaggatattgagattatggcattttacaaaaaaagcaagttacatacgggcaccgcgctcatttgttcccttgcaattgtattttctgcacttcctgtctatgctacagacacgatagacaatctgcaaaaccagacctctgcccttgagaacgaattaaaaggcatcaaccaggatatcctcaccctgagtgagaagatatctgatactgagatgcaggttgagatcctcaacagtgatatagacaaaacacaggatgatcttgagaaagcgcagaaaaacgaagatcagcagtatgaagatatgaaaagccgtatcaaatatatgtatgagcacggaagtgctacaatgcttgagatgcttttctcagcagaaaatatgtcagattttctaaacaaagctgattttattgaaaatttaagtaactacgaccgcaaagctctgaacgatctgaaagatgttcaccagcagattgccgatcagaaagcagacctggaagcacagcaggcttccatgaaagatttacagaaccaattgcagacacagcagacacaattacaggcaaaagctgctgcaacttctactaatttgaatgaggtgaatgcaaaactgcagaaagccaaagaagaagaggcagctcgtcaggcagaagaagccaggaaacaggcggaagccgctgcgaaagccgaagcagctgcaaaagctgaggctgctgccagtgcgaacaaagcgaatacttccagttcctctgggaactccggcaattcaggttcctcatcctccggaagttcaagttcttctggtggctccaatagttccggatctgccattgcgtctgatgaccttacacttcttgcagcaatcctgcaatgtgaggcccactatgattacgactctatgcttgcagttgctacagtcattatgaatcgtgtatatagcagtcgctttccgaattctattcatgatgtcatctatgcccaaggacagtttgctcctgtatggacaggttccttagaccgtgtattaaagcaaggtccacgaagtctttctatccaggttgcacaggatgcgatcaacggagctcgtcttgctgccgtagccgactgttattacttcctgtacgcaccatcgacaagcagaaccggtgttgtaattggcgataacgttttctttacaagttggtaaaataataaaaagaagattaagaagcgccggaagatttcattttcatcttccagcgcttcttttttagaaacaactctattttctactgataatcaacaacatcaatccatctcatcagaaaatctttttcaagttcattttctttagataactgtgctgctgccacaatcggaagccactgctgtacatactgcattgctgtatcactcttcttgcagaacaatttcagatagagatctgctactttctgatctttcagtgcgaaaagcaaatatgtcattgctgcatctgcacttgcatttccctgtgttgcatgagcccagtcaaccacagtcatctttccattctttcctacgatcacattactcggattaaagtctccgtgacatactttattatgctttggcatactctcaagtcttgtcagaagttcataacgtgtagtcgcatcaagatctttcaatccattgatctgacgagctaatttatctttcattcctttcagaagcggtgatttcttactctgaacctgtaactggagatcaacaaagtcttccatatatttttccagattcttcatatcagattccatcatgtcctcaagtgtcttacctgctttgtactcaatagcaattgcccactttccatcaatctgagttacttcttttaccttcggaatgtccagacctgtctcttctactcttgcagtattcagagcctcattaaatacatctgacttcggatgtccttcattaaaaactttcacgatacaatcatcacatttatagactgatttgtaagcacgtttcacgatgagatttttttcttctaacttcataatatagacctccttatatcttgaacgctccttcttgtctgctcttattttatctcagctctgcggggctgttccttttgccttacggctcttactttgttttgatgatgtcattatatctcacaatttttagaaataaaaccccttcagagcaagtttgtgcagtttttaacatgattttttacctcttatatattgtctatttattaacaatcataagctttagctcgttgctcacgtatacttggaaaactcaaaaactgtattttccaagttatcgcggcagtcgccaaggtcttgtgcaagcacagactttggctcgttgctcacgtaaaaaagagacagaacaatgcttttcaacctcattctgtctctcttcgtatattttagattctaacggtcatatgcctgcttatgcaatgcgatttattttccgtagtagcatttcaggtacagatctttgatctcctggatgagtgggtatcttgggttagctcctgtacactgatcgttgaatgcctgctctgacatttcatcaagtgtgtcaaggaagtacttctcatcaatgccgtaatctttgattgtcttcttgattccgatcttctctttgagttcttcaagtttagcgatgaagttctcaaatacttctttgtcatctttacctgtgcatcctgcgaaacgtccgagttctgcgtatcttgcaagtgcatgtgggtactgatactgtgagaatgttcccatctttgtcggaacctctgctgcattgtatctcataacctctgtaaggattactgcgttagcaacaccgtgtggcagatggtggaaagcaccaagcttatgagccatggagtggttaacaccaaggaatgcatttgcgaatgccataccagccatacaggaagcgtttgccatctcttcacgagccttcggatcgtttgctccgttctcgtatgcagatggaaggttctcgaatacaagcttaacagccttcatagcaagaccatctgtgtaatctgtagccataatagatacatatgcctcgattgcatgtgtcataacgtcgatacctgaagcacttgtcagtcccttcggctgtgtcatcatgttgtctacgtctacgattgccatgtttggaagcagagcgtagtcagcgattggccatttaacacctgtgtcagcgtctgtgatgattgcgaatggtgttacctcagaacctgttcctgaagatgttgggatagctacgaagtaagctttctctcccatcttagggaatgtaaatactctcttacggatgtccatgaagtccatagccatatcttcgaagtttgcttccggatgctcatacatgatccacatgatcttacctgcgtccattgcagatccaccaccaagagcgatgattgtatctggctcgaactgtctcatctggtcaacacccttgcgtgcacactgaagtgtcgggtctggtgctacttcgaagaagcatgtatgctggattcccatttcatctaatttatcttcgatcggttttacatatccgttcttgtaaaggaaggagtctgttacgataaatgctttcttcttatgcattactgttccaagctcatccagtgcaaccggcatagaacctttcttgaagtaaactttctcaggtgttctgaaccacagcatattttctctcctctctgcaactgtcttaatgttaagcagatgttttactcctacgttctctgatacagagtttccaccccatgatccacatccaagtgtaagggacggagccatcttgaagttataaaggtctccgattccaccgtgagaagaaggtgtgttgatcagtacacggcaagtcttcattgctgctgcatgttttgcgattttctctgtctctgccggatgtacgtagagtgaagatgtatgtccatatccaccgtctgctacaagctgagctgctttctcaagagcctcatcaaatgttttagctttgtacataccaagtaccggtgataatttctcatgtgcaaattcttctgaaatatctacagattcaacttctccgatcaagatctttgtattcttcggtacatcaacgcctgccatctgagcgatttcataagctgattttcctgggatcttgctattcagcgcaccgttgatgatgattgtcttacgaactttgtcaagctcctcacctggtttcaggaagtagcatcctctgtactggaattctttcttagcttcctcatatacgctttcaagtactgtcacagactgctcagaagcacagatcataccattatcaaatgtcttagagtggatgattgagttaactgccattcttacatctgctgtatcgtcgatgataaccggtgtgttaccagctccaactccgagtgccggctttcctgaagagtaagctgctttaaccattccaggaccacctgttgcaaggatgatatctgcatctctcattactgtgtttgtaagttccagtgatggagcatcgatccaaccgatgattccttccggagctcctgctttcactgctgcatcaagaacaactttagctgctgcgattgtagatgctttagcagccggatgtgggctgatgatgattgcatttcttgtctttaagcagatcagtgttttaaagattgctgttgatgttgggtttgttgtagggataactgctgcaacaagtccgattggctctgcgatctttttgattccgaatgccttatcttcttctacaacaccacatgtctttgtatctttgtatgcgttgtaaatatactctgctgcgtaatggtttttgataaccttatcctcgagaatacctctctgagtctcttctactgcaagtcttgcaagcgggatacgctgcttgtttgctgccatagctgcttcatagaagattttgtcaacctgctcctgtgtaaatgtagcgaagattttctgtgcctcgcgcatctctttcatttttgcttcaagagcttcaacgttatcaacgaatccggtgtttactgtctttgtctctacagtttttgccgcttctttctttgccatctgagtattcctcctgtacttgaataaatcatttttatagtcactgttttcgtaacctgcaagttttatccgatcgggttgtttttatgtttcccgattacagttattagtataccagttcgttaattaattgtcaatgtgcctgttgttaaagttttaacgttatttttttaacatcatttgtgcactttttacaaaactgaattttaacttgacaaaaagactgccggacagtggaaatttctcttccatcctgcccgacagtctgtcgtaaaatctaacgttatatctcgttatcttttattattttttactgttttctcttttgtttccttttttcttacgctgaaccgctactccaccgattgctcctgcactcgctgtaagcatcagtgccgggaacagaagacttgtcatgtcacctgtcttggaagctctattctttgctgtcgtttccttcttgtcacttccactctgactgttgttctgatctttggattcaccggctgaattatccttgttgtcgtctcctttagtgctgtcatctttgctatcatcgcctttggtgccatcatctttgttgtcatctttcttgtcatccttgacaacaaccagaccgtcaatcgcactcttcagtgttgctgctgcttcatcaacctcttcctgcgttgcgttttcgttctctattacaacttttgcatcattcagtgctaaagccatcactgtataactctctgctgtatatgctgattcttctttcgtctctgcatcttcgatcagactcttcaggattgacttatctgctttaaatctcagattcagcatggctgagagtagattgtcttctgtttctgtgatttctttctgcattgcattatctttatctgcaatcagatcttgtgctgctttgagtgcatctttaaattctacctgaccaacttctacatatttatcaagatcaattgcttccgcaacatcaacaagtttttcaagagaagtaatatctcctttgatcattccaagcttatgtacttccgtgagtagtttctgccatactgcatcaacctcttcctgtgttgcatttttatccgctgcgactgtttctgctttctccagtgcttcgctgaaagacttttgtacatctacaattgcattattgaactcctcagactctttctgctgttttgcatactcgattgtcttattcaggaagttcttatttacctggactttttcttctgctgttacagttgtactcactgtgtatttcagattgcttcctacattaagattactgatataagagctctcagacccaccgttacggattccgaatccaccgcttgtcggcagttctttatttacatcgcacacatcaatcagttcatcattcaggtaagtgtaaatcttgtctcctaccgttgcaataaggaatgtattttccccatcattcagaacaatcggaacctctgcaccataaacagcaatgttattaccaatctgtgtatgcttctttaatgtcttgctgtccgaacggaactgccagaagtactgatgacttccatcctgtacattgaatgcgatattggcagcaatattttcaattgtaaatgttccgctgactacatttcccttcttgtcttcgtctgtattgacaactttctgtccttttgctgcataaatcttcccatctttcagattaactccacttagcggactactctgtccatcaaaactccagatcgtgtcataagtaaggttttctgttcctgtctcttttgttgcatcctcaaattctgttgtagttgatacattgatcttaaattcaccggctcctgtaattgtcagattgccagattcatcaattgttgcgccttctccttctacactgaaggttgcaccagccagacttacttcctcttctgatccgtcatcgtaaacattcacaagaacaacctgtgcagtatctccaacttccagtttttctttatctgtcttgacttttacttctgtacctttcagtactttgactacattaaagtccaatgtaccgatttctgtcttagttccgttgtactctgctgttacagttacggtcgctgttccggctttcactggtgtaacaacacccttctcatctacagtagctactgtttcgtcagaacttgtataggttaatttcagtccttttgcttctgtatacttttcaccaaactgatcctttacggtggtcttaatctgtgctgtctttccaagaattaattctgttgtatctgcggatactttaccagtcagagtcacttctgcatcttctttctcatcactgagagacaaatcataagttcctgatccaagttctaccgtcaggtaagtcccgtcgttagttccttttactttctctccatttacacacattgttgtatatcttgcacttggaaccggaagagaaacctttgcttttgtatttactggaatcgtaacgctggctgtcatcttcaggttttcaatatcgtcagctgttccatttgcataggatgcctgaatctctcccttcacactcggtgttgtcacttctgcagatgcaacttcacctggctggaacttgatcgtaaattcatcaaatcctgcatctatcggcataataccaaaagttccctgtacaatagagcagcctggtgcagcaccccacggatgagacattgtcatgtttcctttccacttgtgtccccatgcctccggtgtgatcgtacagttcaaatcatccagaagagaggcaaatgtctttacatccgttccgactttttgattcgtcatcagcttttctgcataatctccatgatttccattatacaagcccttcagaataaagtacgtcacataaacgcttcctttaaattcatccttgcacttttcatatacgaaatcacacatctgatctgccatttcctggctgtcaaacacaccataagtcaatgcataagcagttgcatgggtggaagaatgctttgttgctgcataatcctttgcaagagaatcgtagaagcatccgttttccttatcatatgcatatttcagaagactttctttgagcttctctgatttctcagtgtagtattttgcatcatctgtctttccaagtgctgtactaatatccgccatcttaagatagattccaacatactctgcattgaataccacatcataataacttccctggtatccatctctttcggatgttggccagtcaatcaaagatgtattacctgcctgacttccatttgcccgtatcaatcctgttgcagaatcttcatattccacttcttctgtcagttttttcttaagtcctgtgtagtactccgaaatagaatctttgtttcctgtatacatataatcgagataagacatctctacagaaaaaattctgtaatcatttggccaggtctgattatcgatcagccattcgttagaatgtcttgccaatgaataattttcagacactgcataacttgtgcttgaattaaccaataaatcgccttcataaggagcacgctcacgggcttgtgaatcagtaaacacatcctgatttgttgcttcaatcgaatactttgaaagttcccacagacgatttaacaatgttgctgcatctgaaccgtctgttgccttgaagcttgaatcctcttgatcaaattcttgtttgatcgcccatcccatgatgctgtctggattgtccacaattgcctgctttgttacatcatccagaccaatcagctcgacataacggaaattacgcattgtagcggtctcaaattcgtttgtgccttcttttaatgtccatgtatcttcataaacaggttttgcagataactggtattttacgttatcaccattcatctcttctcccatatgaactgtaacagactgctttgcgtcactctcgatgttgactttcataccaccgataatctcttttccaagatctacaactacatttcctgatttattgatatataccttcttggttgcttccttcgtagtctcacgaagcacattctctgatgtatatggataaagaactcttccactcgttcctgttgctgaatcagccacctgattcttaatcactgctgacgcccatttactatcatcatagtctgcattctgccatcctgccggatatttctcagcattaatattatcatgtaaaagtgttacatatcctgttccgataccgctgccgtcatcgccaaacgcatttgttccatcaagtgtcttccatcctgaattttcaacaccactattagtcagaacctgttttgttccatccttataaaataccgtcatctgcaccaaaatacttcgactgtcatctcttgaatttccaacagcactgattacattagcatctccgtttgtaagaagttctgtcacatcataagaattataataaacttgagtatatccacttccggtgctgtatttacctacattagacatctctcttgctgatccggccccaaggcaggttccgttcatgaatatatcataaatcgtgcctctgtcctttgctgttccacggcttgccgtacttacaattgccttatcaatgttatcagtattttcaattgtaagctttggactacggaaaaaagaatatcttgagatttctgttaagagattctcatcttctttatctgactcttccggagttgtctctcctgtatatggctttgttgtatcaccggaccatacactgtacactgactttcctacatttaatttgccatctacaacagacagacctgagaaaagcttatcatctgactcaaaatctgaagaatacaaaactgtctttgcttcatctgttgatgtaattaccaaatcatctattgttccagcttctgttcttccggtacgatatccgattcttccatctgtacgaccaccatctacttcagcagacccaacttctacatactgtgcatcttcactctgcaaatctgtaagaatagaaaatgtcatccttattcctttgaaatcaatccttacgccaaattcacttccatcttctggtaatgttatttctgattcagctaaattgattacctgaaatgcatttgtattaattgtgccattatcaatctgatgaatcttaatctgattatcatttgaacggaattgaaccatataaccattctttccagcgtcatccattctgacaagcattgcaaatgctccaccttctttgatggacatcttctgttccaatgtaaagtctgtccatagacttggatctttctcttcttctcctgactccggagttgcattcggtgttgcccaaattccattcagactctgccattctcctgatacatttgtcataaatggacaagcttctgataacgggctctcatttccatctttatcttttgtctgcacctgccagtaataaagttcattatcctgcagcttatctgacagaccctctgcatgtgcataactgttctcgtccgattccacccagcctgtatcaagcacctcacctttcagttctgatgtttctgaaataataatacgataagctgtctgtacttctttttgatctttgtcattgactacccatgagaaagccgggtctttcgtatcaataccatatgcttcattaagcatctctgtcttgagatttgtcggtgcatccggtgcatttccttgtcctgcatacacagttgacacaaatgcatatggtacagtacctgtaccggcaagtactgttgcaagtaataatgcgattgcctgtttctttttcatagtgttcgctccttatcatccctgtgttgtgtaaatgtgatttctttatgaatatcttgccaccattatcacttaaactttcttttccggcaatcgtaatatattttgaaattgggtaatttatttttgagtttcacctcatcaaaaatttcccccatacatccaaagattttttcggtaatctcttgacttgcacagttgtaaagatattaggaaagcactttcctaatatacaaaaaactcctatgtaagacatacatctcacataggagtcaaaaatcagctatattatcaaattaaacaagctcgatcagaacttccatagctgcgtcacctttacgctgaccaatctttacgattcttgtgtaaccaccgttacgatcagcatattttggagcgatctcatcaaagagttttgcaaccatgtcaacatctttcatgtttctcttctcgccttctttaaccgggaagagaactttcagcatctgacgtctagcgtgcagtctgcttggcttatctttcttgattgtcttttcaacttcgtcataaacagtaactttcttaccgtcaacaacttctttcacacgttttccatcagcgtctttacgtgctactttagccattactgtaacttcttcgaagttatctttttcttttacagcaagagcgatcaggctttctgcctgcttacggatctcttttgccttagcttctgttgtaacgatctttccgttgttaagaagtgctgttacctggtttctaagtaaagcttttctctggcttgctgttctgccaagttttctatactttgccatttcaaatttcctccattaattaacatttggttatgcgtcttcgggcttactaatcaaatgctcctgctgtgctcttcgggcttaccatcaggatatttaatcttcagcgggctaatattcacaatctgtgaattcagcctgtgcaggacctaagcgtcctgatactttatcatagtacggataaagaatattattcttctccgtggttcagttccagattgagttctttcagttttgcaagaacttcttcgagagacttacgaccaaggttacgaaccttcatcatgtcttccggagtcttgtttgtgagctcttcaactgtgttgattccggctctcttcagacaattgtaagaacgaacagaaagctcaagttcatcaatgctcatctcaagaactttttctttctcgtcatcctctttctcaatcataacttctgcctgctgagctacctctgacaggtcgatgaagagtttcagatgctcacttaacacttttgctgcaaggctgacagcctcatcaggagccattgtaccttttgtccagacatcaagtgtcagtttgtcataatctgtaacctgacctacacgtgtatcctgaactgtcaggttgacacgatcgatcggtgtgtagatagaatcgattggaagaacaccgattggcatatcttctgtcttattcttatctgagcttacatatcctcttccttttgtgattgtaagttccatataaagcttgctgtctttgccaccgcttaatgtagcaattacctgctccgggtttacaatctcaatatcagagtcgcactggatatcagcacctgttacaacgccttctccttcgaactcgatataagctgtcttcacttcatcagactcagatgtgttcttgatagccagagatttcaggttcatgatgatctctgtcacatcttctttaacacccgggatggaactgaactcgtgcagtacaccgtcgattttcacagaactgattgctgctcccggcagggaagaaagcatgattcttctcagcgcgttaccaagcgtagttccgtatcctctctccagcggttctacgacaaatcttccgtatttcttgtcatctgaaacatctgtaatttcaatattcggtttattaaaatcaaacactacacagaccctccttatgggcttaatatatgttgagggggtacaaaactgtatctaaacaacttgttcagattagttaggattgccctgcataaatgcctgcgcaatcctttcaaatcgtaattattatttagaatacagctcgacgataagcatctcgtcaaccggtacatcgattgcttctctgttaggaagctcttttactgtacctctaagattctcagcgtctgcctcaagccactctggtaccatgtttccagctgtagcttcaagaatctctttgtatctctgtgaaccttttttgttctctttgatttcaataacatctccagcctttacaaggtaagatgggatgttaacctgtttgccgtttacaagaacgtgcttatgatcaacgatctgtctagcttcttttcttgttctagcaagtccaagacggaaaacaacattgtcaagtcttgactcaaggatgatcataaggttttcacctgtcattccttcctgctgttttgcctttgcatagtagtttctgaaaggtttttcaagaacaccgtagatgaattttgctttctgtttctcgcgaagctgaagaccatactcgctcatctttctgtttgctctttttaactgtctgttagatttcttattgattccgaggtaaatcggatccattcctaatgaacggcatcttttaagaacaggaactctatttactgccatttctatcctcctaattattatacatgccagcggtactcatgccgctgcgtcaacatttactattaaataactgcttttcttatacagcagagtataattagactcttctgcgtttcggtggacgacatccgttgtgcggtaccggtgttacgtccttgatgcttactacatcaattccgcatgcctgaagtgcacggattgctgcttctcttcctgatcccggtccttttacgaatacatctactgtcttaaggccatgtactaatgctgccttagctgctgtctcagctgccatctgtgctgcatatggagtagattttcttgaacctctaaatcccagaccgcctgcacttgcccatgaaagagcatttccctgagcgtcagtcagtgtaacaattgtattgttgaaggatgactgaatatgtgcctgtccgcgttcaacgtttttcttgacacgtttttttgttacttttttcgcaactctcttagccatttaaactaacctactttctttattttatacgttcttattatttcttcttatttgctacagttctcttaggacccttgcatgttcttgcattagtcttagtcttctgtccacgtaccggaagtccttttctgtgacggattccacggtagcatccgatctctttcagtctcttgatgttgagctggatctctcttctaagatcaccttctacaacctgagtctcatcgatcactgcgctgattttctttacttcttcacttgtaagatctcttacacgagtgtcaggattaactcctgcatcttttaagatacggtctgcgcttgttctaccgattccgtagatataagtaagaccgatttctacacgtttgtctcttggtaagtctacacctgcaatacgagccatgtgtctttcctccattttcttttctggttttcttgttcattgtccctaattgaggctgcgaatgcgaaatgagtatcttctattttaataaatgaagtctggtgtaactcatctactgctgcatcctaccggaatgtatccttccgatatcccagcccaggtatgtacggaaactacataccctttcccggcacggatcatactctcatccgccaatgcaaatgccgggtattataagcaatatacaatagcatcttccctctttaatataaagatgacaaacgtctgtcagatgcccagactacacgctctgtcggtacctgcggacagatgcgatgtatccttactgtatattaaacagctccacacacctcctggcgtgtcatgctgtcagccgcttgataattgcacaaaacatcagtagcatcactcgactaggttcgataatacctcaccaagtctcctgataggctttctcactaaattcgtgctacgcttacgcttgcactcatcaagtgttcaatgccttagccctggcgctgtttgtgtttcgggttctcacagattactctgatactaccttttcttctaataattttgcatttttcacaaattggtttaactgatgatctaaccttcatgtcaaatcctccttccctactttgctctgcctatatattccggtatttttggacacacctctccaaaaatgaccatttcatactttaccacaaaatatatggtaaagtcaagacctaaattaaaaaagatattattttctaaaaatacttttcagaaaataatatctttttatcttttcagatacggaacgttgtaaacaacaacattcccgttatttgatgtgtagaattcttacttgtctctccagacaattcttcctttgctcaggtcataaggtgacatctcaagtgtaaccttatctcccggcagaatcttgatgaagttcatacgcagcttaccgctgatatgtgccagtacaatatggccattctcaagttctactttgaacattgcgttaggaagtttctcaactacaactccttcaatttcaatcacgtcagtttttgacatttttaatcctcctgaatgaaatcaacaaaacttactctccaagaatctgaacgattgcagcaaatacatcgttgatatcgattgtaccatcaacttctctgagtactcctgcttctgtataataatcgatcagcggctgtgtctgctcatgataaacaccaagtctcttaagtactgtctctggtttatcatcgtctctcaagataagctctccgccacacttgtcgcagatgccttcttttgcagtcggagcatatacgatatgataagtagcaccacaatcaacacaagctcttcttccagacatacggtttacaatattctcatctggaacttcaacatcgatcgcataatcaatcttctgtcccatctcagcaagtgcacgatcaagtgcctctgcctgtggaattgtacgcggaaatccatcaagtacatatccattcttacaatcttcctgatttactctgtctacaacaagatcaacaaccagctcatccggaaccagaagaccctgatccatgaaagtttttgctttcttaccaagttctgttccgttcttgatgtttgctctaaagatatctccagtagaaatatgcggaatagaatacttctcagcaatcttctttgcctgtgttccttttcctgctcctggggctcctaacatgatgagtttcatatctttatcctccttatacaagtttaacccgctctgttcgtcctgcaattgaggacagaacaaagcgagctaaaagacatttaatagaaaacaatatcaataactgttatctcttattatttaaaaatcctgtgtaatttcttacaagcatctgtgattcaatcttcttaattgtctcaagtacaacacctacaataatgataagtgatgttccaccaaaggaaacgtttgcaccgaaaacaccattgaagaaatatggaatcacctgtacgatgatcaaaccacacgcaccaacaaagatgatataattcaaaatctttgtaaggtagtcaactgttggtttgcccggacgaattccagggataaatccaccgctctttttcatattatttgcaatctccatcggattgaaagtaatcgatgtatagaaatatgcaaagaatattgtaagtaaaatgtaaaccacaagtccaactgaataaatcggattctctggatcacaccagttattggagtttaaacctgcaaggatcttacttccaattccagttccatttccttttccaaggaactgtgcaatcacgattggtgtctgcatcagtgaagaagagaagataaccgggattactccggctgtattcaccttcaacggaatatgtgttgactgaccgccatacatttttcttccctgtacttttttggaatactgaactgcaattcttctttctccgtcctgaagaatgataacaaacacaactacaaccagaagaactgcaaggataataacaccggcaagtcctgcctttgcaattgttttgcctttcatgaactgtgtatacagtgccacgaaatcatccggaacacgggaaacaatgttgatcagaagtacgatagaaataccgtttccaactcccttttcagtaatacgctcaccgatccacataagaaatgcactaccagctgtaagcgtacatacaacgattgcacaatttacgaaattatattcttccagaagtccctgacgtccaaatcctacagccattgcgatagattcaatcagtgcaagaccaactgtcacatatcttgtaatcgctgcgattttctttcttccatcttcaccatctttctgcatctcttcaagctttggaatcgctattgtcagaagctgtataataatagatgatgtgatatatggagtgatactcagggcaaatactgacattcttgtaaatgagccgccggtgaacgcctcaaaaaagttaaatgcgtcaccggtctgctgtgcaaaaaaattctgaataaatgtcggatctactcccggagtgggcaactgtgatcccaacctaacaacgataagcattgccaatgtatagagaagtctgtttctgatatcctcaatacttaatgctttacgcaaggacttaagcattagatcacctctgcttttccaccaagagcttcaatcttctcagctgcttttgcactgaatgcattagcctgaactgtaagcttcttagttaactctccatttccaagaatttttactccgtcttttggattcttaacaataccgctttcgatcaatgtctcaacggatactgtagcgccatcctcgaatacttcaagtgcgctaaggttgattcctacgattgtcttagagtttctgcatgtgaaacctctcttaggaattcttctgtataaaggcatctgaccgccttcgaaaccaggtcttgtagctcctgaacgagccttctgtcctttgtggccctttccggctgtcttaccgtttcctgaaccatgaccacggcctcttctgaaattatcactctgttttgaaccgtctgccggtcttaagtttgataagtccatgacattacctccttatcttaattaagcctcttcttcaactttaactaaatgtctaacctgctgtaccatacctctggtagctgcattatctggcaatacaactgttttgttgagtttcttaagtccaagagcctcaactgtttttctatgctttggtacggcgccgattgtagactttactaatgtaacttttaaatttgccatttcaatcttacctcctatgcgcttgatcgggcttctcggttgattagcctaagatctcctcaattgatttgccacgaagtcttgcaacatcttccggagtcttaacttctttaagtccttcgattgtagcaagtacaacattctgtttgttgttggatcctaaagattttgtacggatgttcttaactccagccgcctcaattacggcacgcgccggtcctccggcgataacaccagtaccttccggagccttcttaagaagtacggaagcgcttccgaatttaccaatcacatcgtgtgttacacttgagttttcatcaagagatacgctgatcattttcttcatagcgtcctctttacctttacgaatagcttccggaatttcagtagcttttcctaaacctgcaccaacatggccatttccatcaccaacaactactaaagctgtgaaacggaagttacgaccacctttaacaactttggttacacgcttgattgataccactttttctactaattccatctgactagcatcaatacgttcctgtctcatctgtgttctcccttccttagaaattcagaccagcttctcttgctgcgtctgctaatgccttgattttaccctggtaaatgaatccgcctctatcaaatacaacttcatcaatacctttagcttttgctctctcggcaattacttttccaaggtatgctgctgcttcaacgtcgttagtcttctcgagctctgctttcacttctttctgaagagtggaagcggaaacaagagtatttccaacagtatcgtcgatgatctgtgcatacatatgattattacttctgaatacagctaaacgcggtctctgcgctgttccgctgaaacggttgcgtaatttcatgtgtttttttctacgaacttcgcttctagatttcttactaaccattttcacactctccttatttatttcttaccagtcttaccgactttacgtctgattacttcatcagcatatttgattcccttgcccttatatggctccggtcttctcttatctctgatctcagccgcaaactgtccaactttttctttatcgatacctttaacagtgatcttgttctgtccctcaagtacagtctcgattccttctggatcgatcatctcaactggatgggaataaccaaggttcagtgtcagtttatttcctgatttagcagctctgtaacctacaccgttaacctcaagaactttctcgtatccctctgttacacctacaaccatgttgttgatcagtgttcttgtcagaccatgaagagatttcattttctttaagtcgctcggtcttgtaacgattacttcttcgccttcaactttgatttccatttctactggaagctcttttgtaagagttcccttaggaccttttacagtcactacattgttctcagcaacttctacagttactcctgcaggaattgctacaggcagtcttcctatacgtgacataccattatcctccttaacttagattctcggagaagctgcgttggcttctctgttttcagttacatttataaggaagttcttttcactaagctcgaaaggacctcgctaagttcaaagaacaacctcgcactaagctcaaacttcggctacgcctcgttctcactaagttgctttcggcttaccaaacgaagcaaagaacctctccgccaacgccgagttttctagcttctttgtctgttactacacctttgtttgtagagatgattgctgttccgagtccgccaagtaccttcgggatatcctctgtattagcataaacacgaagtcccggtttggagattctcttcagtccggaaataactttctcgttcttgtcagcaccgtatttcagtgtgatgtgaattgtcttgaaagctccatcttctacaaggtcatattttgcgatatatccttcatcaacaagaatgtttgcgatagcaagtttcatctttgatgccggtacatctactgtatcatgttttgcagtgtttgcattacggattcttgtaagcatatctgcaattggatcgctcatagtcatgtgtgtgattcctcctatgttatttcacagtatatagttgctttcgtcttaccagcttgcttttttaacacccgggatctgtcctttataagccagttcgcggaagcagatacggcagataccgtattttcttaaatatgcatgcggacgaccacaaattctgcaacggctgtattctcttgtggagaactttggtgcacgctgctgtttgattttcattgatgttttagccatgaatttctctcctttttactttgcgaatggcatattgaactgtgtcaataattcacgtgcttcttcatcagtcttggctgttgtaacaaaaattacatccatacctctgactttgtcaatcttatcgtactcgatttccgggaagataagctgctccttgattccaagtgcatagttacctcttccgtcaaatgcgttcgggtttactcctctgaagtcacgtacacgaggaagtgagaggttgatcagacgatcaacgaactcgtacattttctctcctcttaaagtaactttacatccgatcggcataccctctctgatcttgaagttagctacagaattctttgctcttgttacaaccgctttctgtcctgcgattttctccatgtctgcaatagctgactccagaagtttagcattgtcttttgcctcaccgacacccatgttaattacaaccttgtcaagtttcggcacttccatgatgtttttatatccaaattttttgatcattgcatcaacgatctcattctgatactgctctttcagtctactcaaagtcctggacctccttccttgaattaatcaataacttcgcctgttgccttagcaaaacgaacttttttgtctccatccatcttaaagcctactcttgttgcttttccgttatgaagtaacataacgtttgatgcatcaatgtaaccttcctgatgtacgattccgccgttctggtttgccatgcttggctttgtgtgctttgtcagcatattgacgccttcaaccaggacttttccgtcttttttatctacggcaataactttgccttctttatctttatcttttccggcgataaccttaaccatatcaccttttttaattttcatagttgacattctcaggcacctccttacagtacttccggagccagagaaacgatcttcataaagtgtttctctctaagctctcttgctactggtccaaaaatacgtgttccacgtgggttcaaatcgtcttttataataacagcagcattttcatcgaatctgatataggaaccgtctttacgacgagcgccttttacagaacggacaacaacagctttaacgacatcaccttttttaacaacgccgcctggtgttgcatctttaacagttgcaacgatcacatctccgatgttggcgtatcttcttgtagaaccgccaagaacacggatacacagtaactctttcgcacctgtgttgtctgctactttaagtctgctttcttgctgtatcatgcaggtaaacctccttcaaataattatttcgctttctccatgatttccacaagtctccatctcttgtccttggacagcggtcttgtttccataacttttactgtatctccaactttacactcgttgttctcgtcatgagctttaagcttgtaagttctctttacgatcttgttataaagtggatgttttacatggtcttcaacagcaacaacaatcgttttgtccatcttgtcgctgacaaccttacccgtacgggtttttcttaaatttctctcttccacggttgctgctcctttcactatgctcttttagcctctgtaatcagagtctggatacgagcgatattctttcttacttctttgattctgcttgtattatccaactgatttgttgcgttctggaatctcagattaaagagttccttcttagcagctactaattcttcatttaattcctctacggattttccttttaactcgtttacaaatgtattaattttcactgttatcaccgccttctaagtctgcgcgagaaacgattttgcatttgcaaggtaatttatgcattgcaagtcgaagtgcctctctagctatttcctctggtactcctgcaatctcaaacataacacggcctggtttaactactgctgcccaatactcaacagtaccttttccactacccatacgagtctcagccggttttgctgtgatcggcttatctgggaagattttgatccaaaccttaccaccacgcttgatgtaacgtgtcatagcaacacgggctgcctcgatctggttagaacgaatccagcatggttccatagctacgataccaaattcaccgtaagaaatcttattacctctaagagccttacctttcatagtaccacggaactgtttacgacgttttactctttttggcattaacattatctatctctcccttccttatctgctttagtcggaagaacttcgcctttgtaaatccaaacctttacaccgacttttccgtaagttgtatcagcttctgcgaatccataatcgatgtcagcacgaagtgtctgcagcggaattgttccctcgctgtagaactctgtacgagccatatcagcaccgccaagacgtccggatacggaagtcttaactccgagtgctccagccttcatagttctggacatgcatgatttcatagcacgtctgaaggagatacggttctcaagctgctgagcaatgttctcagctacaagctgtgcatctttgtccggtctcttaacttctttgatgtcaacgatgagcttcttatctgtgaactgtgcaagctctgctttcaccttttcgatctcggaaccacccttgccgattacgacaccaggcttagctgtataaacgatgatcttaacgcgatcggatgctctttcgatttcaatcttagagattccagcgctgtataatctcttctttaaaaactttctgatctcgtggtcttcaaccagattgtcagcgaaatctttttctgcgtaccatttggaatcccagtctttgataacgccaactctcaggccatgaggattaactttctgtcccatattgtcctcctatctctcattgagcacgattgtgatgtggctcattctcttctcgattctgtaagctctaccctgtgctctaggtttgattctcttcattgtcggtcctttgtttgcgtagcattcctcgatgtagaggttctcaacgctcataccgttgttattctcagcatttgcgattgctgatttcagtaacttctctataacgcttgaagcatatcttggattgtatgctaaaataccaagtgctgtctgtacatccttgcctctgatggcatcaagaacgaaacatgccttctgaacagatactcttgcgtaagaaatcttagctgaaggtcttgtatctctctgctcgtttctttctcttttgatttgggatctatgtccttttgccatggatgaaccctcctttcaaaatatatgaaaattatctaacttttgacttcttctcgtcttttccgtgtcctctgtaagttcttgttgcaacgaactcaccgagcttgtggcctaccatatcctctgtaacatatacaggcacatgtcttcttccatcatgtacggcaaatgtatgacctacaaatgatgggaagattgtagaacggcgtgaccatgtctttataactgttttatcacctgcagcgttcatagcgtctacttttttaagtaagctttcgtctgcaaatggtccttttttaagtgagcgagccataggttctaacctccttgtgaatctgattatttaatcgctttaccatctcttcttcttacaatcagcttgttagaagatttgttcttcttacgagtcttaagaccaagtgccggtttaccccatggagtacacggtcctggacgtccgatacttgtcttaccttctccacctccgtgtggatggtcgttagggttcattacagaaccacgaactgtaggtctgattcccatgtgacgcttacgtcctgctttaccaacattgatcaggttgtgatcaccgtttcctacaacaccgatagatgcgcggcagatgatcggaaccattctcatttctcctgaaggaagtctcagtgtagcgtactttccttctttcgccatcagctgtgcgctgttaccagcggaacgaaccagctgtccaccttttcccgggtacagctcgatgttgtggatctgtgtaccaaccggaatctctgaaagtggaaggcagtttcctactctaacctcagcgccagcaccgttcataactgtcatgccgtctgtaagtccttctggagcaaggatgtatgctttctcaccatctgcgtagcagatcagtgcgatgttagcacttctatttggatcatactcgattccaacaactgttgccggaattccgtctttctttcttttaaagtcgataattctatatttcttcttagctccgccgccacgatgtcttactgtgattttaccctgtgcgttacggccagcttttctcttcttggattcgaggagggatttctctggagttgtctttgtgatctctgagaaatcagaacctgtcatctgtcttctggaaggtgtatatgggttatatgttttgattcccattactgtctctcctttcgtttgctctgattatttgtttcacgggtttgcaccgtataatgtcttattttttacagaccttcaaagatttcaatatcagcgctgtcttctgtcagtgctactacagctttctttgtcttagctgtctttccgaaagtcattccacgtcttttgttcttaccatcaaggttcattgtgttgacgctttttacttttgtaccgttgaacattttttcaacagcttctttgatctgagattttgtagcccctgtgtgtacaaggaatgtatatttcttgtcagccataagctccatgctcttctcagttacaactggtttaaggattacatcataatactgaatgtttgccattatgcgtacacctcctcgattgctgcaacaacagctttcgtagcgattactgtgttgtatttcaggatgtcatatacgttgattgtgtttgtatgtgctgttttaacatccgggatattctttgcggaaatctcaacattcttgtttccatcttcaagaactaccagcgctttgttaacgttcaggttgttcagtactgcctggaatttctttgttttgatttcgtcgaaattgagttcatcaacaacgatgaatttgttctcttctactctggaagtaagtgcagacttaagagctgctctcttctctttcttattcattttgaaggaatagtctctcggaactggagcgaatacaactccaccgcctgtccactgtggtgatcttgttgatccctgtcttgcgtgacctgttcctttctgtctccatggttttcttccgccaccggaaacttcagaacgtgtcttggctttctgtgttccctgacgattgtttgcaagctgatttacaactgccatgtgtacgaggtgctcattaacttcaacaccgaatacagcatcgttcagttcgattgtatcaacttctttaccttcgatattgtaaacagatacttttgccatctgtatgttcctcctttcttagctgtcagactagtttgccttcactgtctctttgattgttaccaggcatttctttggtcccggtacagaacctttaacgaggatgagattgttctctgcatcaactcttactacttcaagattctgaacagtgatcttcttgttacccatctgtcctggcatcttcttacctttgaataccttacttggatcagatgctgaaccgttagaaccagcatgacgatggaacttggaaccgtgagtcataggtcctctgctctggttgtgacgcttgattgcgccctggaaacctttaccttttgaaacagcagttgcatcaatcttgtctcctgccgcaaagatatcagctttaatttcctgagcaagtgtatactcttcagcgttctcaaatctgaattcttttacatatctctttccggatacgcctgctttgtcaaaatgacctttttcagcttttgtcacaccgtttctgtgagcgatggacttctttccactgttgtcttttgtgacaatcttttctttcttgtcaacatatccaacctgtactgcgctgtaaccgtcattctcaactgttttaacctgtgttactacacaaggaccagcctgcagaaccgttaccggaatcagaactccgtcttcttcattgaagatctgagtcattccaacttttgtagctaagatagctttcttcattataattacctcctgtgatttacagcggaacgctttcgcgctcatcctaaattttaggaatactgtttaaaattaagatgtccttattatttggacttcatcttgatgtcgataaatacaccagctggcatttctaatctagaaagtgcatcaacagttttctgtgttggtgtgatgatatcgatcagtcttttgtgagttctctgctcgaactgctctctggaatctttgtacttgtgtacagctctcagaattgttacaacttccttcttagtcggaagtggtaccggtccactcacctgtgacccgttcttttttacagtttcgatgattttctttgcggatgcatcaacaagctgatgatcatacgccttcaatgtgattctcattacttgacttgccataaaaaaagtcgcctccttttcgtacttttcacatcagtacgacaagcggtgactgtacactctcccgtgtgtgtcgtgagaaactcacacgttgtttcatactcctaccctggttatcccattggggcaaatagtaatcagtttttgattcgtacagtgacttgtcgccagtttcctaacttgacattcgctccacggaaaacctgcaccagcttattcatttgccgggcagcaacctcgcgcttcattgctatcatgtcacagctctcttagtatatccgagagagcgcaaaattgcaagtactttttttgttttttttcaagtacaatctttttcttctttattcttgtgttttctcatgtatatatgtttaattattgattgattcacttcctattatattttccgtttcattccctattatatatagaagaaactcgttttatatcattatttccccctttttattcaatacatgatgtgtttaaaccggatcccaattaagattctcataatttttcttctcaaatgcttgacatcactctgttcgaatgatattattatctcgacttgtaagaccaaaggcggttttcctatttacctaggagaaactgtctttttttattcgtttttacaggtcagatacttcagttatcatgcagtacgctaacgccggatgttttccccaagaacatccctgccgcagcagtaccgtcagcgcacagcctctttgtaggaattccccagtttcgtgtgcagatgtttctgtctggtaactaaaggatcctctcaattacataccatagaaatgacgccgcctgctggagttgcagatccagcaaagcggcgtcatttccgttataatgcattcttgttactgttcacacgatgtgcgaccagtaacgcattctttacttttataagagtttttctatctccggaaatggactcagactccttttcaatattccatgaatatatgcgatcaccattccatagtttgcaatcgggattccttgatcctgtgcgcaactgatcctgtatttcatttcgcgttcattcagcatacaccctccacaatgaatgatcattttgtatgaaccaaggtcatctgggaattctgttcctgaagaagtctctattataagttcttttcctgtatactctttcagccagcgtggaatcttcaccgtaccaatatcatcacactgtctgtgatgtgtgcacccttcactgatcagtactttatcaccgtcttccagaatatccagtgcctttactccgtgtaccattgtttccagattccctttatatcttgcaaatagaatcgaaaaggaagttaataagatatcctttggtgtatcttttgacactctaccaaacacctgactgtctgtaataaccatcttcggcttttttccaagtgaagctaatgttcctgcaagttctgtttcttttacaacaatagcggatgcatctgcatccaaaatgtcacgaatcgtctgctgctgtggcaaaatcaggcgtccctttggtgccgcactgtcaatcggcacaacaagtactacaaaatcggacggttcaagaagatctccaacaatctttcgttcttcctcttcctttcctttcaatgctccaagttcttccttcagctcataaattccgcttttatccgctgcacttacaagaagaatcttctctttctctgttttcaaataacttgcggtattttcctgtacccgcaatctctcatcttcttgtgtaaaccgttcacatttattcagtactattatataaggtatgttctttttctgaatccgctctgttatcttgagatcttcttcactgacgccacacgttccatcaatcacaacaacagcaatgtctgtcttattcaacacctgatagctcttcttcacacgaagttcacccagttcaccttcatcatcaattccaggagtatccatcatcacaacaggacccaacggaagaagttccattgtcttataaaccggatccgttgttgttcctttcacatcagaaactaccgcaagatcctgtcctgttaccgcattcatcacgcttgattttccagcattgcgcttaccaaaaaagccgatgtgcactcgttcggacaccggcgtctgattcatacccatattctttttcctttcttttggcggagacatgtgggaatcgaacccacatggcaatttcacaaatccctgtagaatcaaggtttttgaactggacagaaacgaacgtgacagcttcgtgacaccatacaacatatagaaaggagtattcagcacacctgtttataattaagaataatgatttaagcctatcactcttctgatatgtttaaatgattgtttttgttctccgcttttatataaatattgcctacactataacagaataattgatgttatgcaacaaattaccccatttataataataaacttctataaggctcatatagccattttaccccataaaggcatatttattggttgcctaaaataaaatggattccaggggcaaacacaggcttacggaggtattccgtgaatatgattaaattatttattataccataaattttaaaaaaattcaaaaatatttttcaaagggttgacattaattttcgttgggtgtattatatatttataaagttagttaaactgttcaagttaaaaagacatattttcaatatatgttataaaacaaatcataggttgcacagttcgtgcaataatttcaacaaactagaagaaattgaatattgaaataattatagttgttatggagtccatgtggaatgtttctctattgttatctgctcatggttatgtaaaaaggtaacatattaaatcagaacctaaagagccatgcttttgatatttgtgagtttgttcgctctcatttattcatttatgtaaaaaagaccagcacaggaagccaccacatcttcctcttgctaggtcttttttaattggaaaacaggaggaaacaaaaacaatggatgataaacagcatacaatgttaggaattgacacaatagaagtggttattgacacgccagttgaaataatagaaaacaatgtaatattcgaaagcaatacaggaatcaagatcggagaattgaaacacaagcaaggtaaaacacacgggtatagattgaatatcaatcttcctaagtgcatcagaacaaataacatagagccttttggtgttgtggatgcatgtaaactgtatgaggtaactcaaacgataacagaacaattaagagaatattttggagattatcttccagaattgcaagttagggttgcggaagtcaatgctacagttgtcctaagacataaagagaatgtacaaccaatgctgaacatgataacagggatgctattacaggatagaacaaacgttgctcatttaactgtacggggaaagcagatcggacagagatataagaaagtcgaaacattaacatctggaatgaatgtagaatcgttgaaactaccacaaaatagtacagggcgattctcacagaaaatatataataaagggcttgaacaggggatacaggataaaaaaggtataatcagaatcgaacatatctataacagaagtggtttagattttgctaaaactggaagatacttgaatgattttctaacagttgagtcaatacagtctttgctacaatgtttcaagtctgattttaaaaagtatttttgtgatcggttctggaacaacattggtagcacaccatactataaacagtgcatacagatgatattatctgatttaaaacattgtaagccattaacaacagcacttgtaaacagaacaatcattgaacaagatttctcattttttgctaaggcttgttacttacattatgataatccagaaagtgctaggaaaactatttacagagtgcgtaaaagtggagagcttgaaatacatgagaatgtagcagatgattttgttatgttatgcaagggtataatctatggataacagggacataaaatgggacagtagtgtcccgtagaacaaccgagaacaagcgaaaaaccgttgattttctttaaaaaatagtactaaaggttaaggatataacaatatgacaaaggtggtgatattggtgtggcaaaaggaagaaagccgttatcggtaggcatgaaacaaaacaaagaagattttgacagggaacttaagacgtacagtacaaaggcattgaaaaatatcataacaatcgcagagaacagttttgatgcaaatacaagattgaaagcaaatcaataccttttagataaatgttatggcaaggattacaaagctatagtagatgaaacagaacagaacaccgaaacaaaaataatgctacagatagtaaacccaaaacagaacataaatgtaaatgatataaacaacgagataacagaaacgctcacagacaacgaaaatgacgactctgaaccatggaaagagccatcatggggcgcagagatatataaaccatagagaaatgtataccaatacacataaaagccttaaatggcgtaaatacaaagccacagggcataatatgaaaggagaatttaagaatgtattttaatagttcaaataatagtcgtaacaataaaacaaataaaacaatggcagagctagagagacagcaagaacgacttattagaatgcataacaatgtattcaatgaaatatcaaacatggaaacagcgaaacaatatatttcttgcagaaatctgctgaacgtgttttccaaagaagagggagtcaatacacttgatatctataaattgcgtaaaatgcttgaccagaaagtcacagacctcttagaacaaaatgacaagcagatggaaataaaacaaacacagattgcagagattagagccattcgtattgaagaaagcacagaacaattacagagacttgaatatgagagtaacaatgttctttattcatacatggcagaattgcatactaatgggatacaggagaacggtgatcgcagaagaattggtaattggtgcaagaatccaacacgtgtacaagctatagcactacagaaattgtctagcctacctcaatattccagttattttactgacagacagagaaaagtcattgtagaaaatgcaaagaatcaagaggaactaaagcacgaacaagccatcaagccactgttagatcagaaacaggcagaactaagtaagctgtacatggagggattccaattaagacatattcaaaagcaagtatctaatgatttaaaaaaatctatgagggagggatagcgtatgaaaaaagttgtttcatcacgagaattgacggagactgcaaagagagtcgcacaatcaaaaaggctcaaaagcttacaagtaaggaaaaattatgttatgaacgagttgccagatgccccaccactactctgtattaacgaactggcatacaaaacaaaacttccatatcagttattaagaaagataattgttgaggaacataagattccatatgtaaagattagcaacaaatattatgttaattataatcatgttctaaagtacatggatgaactaagctaggagggagaacaaatggaaaataaccaccaattcacagaacaggaagtctatgagattgcaacagacgcttataagcaaacacataaattatcatatcttctactgcatagggcattgaagagcgttctaaagagattatcagaagattgtgttatttatctattaatgcaagaaatgagtgtaaaccacaaaacaaaaaatgtctgaattgactatacaatttcaagagaacattcaaaacagaacatattttacagtaaaacagaacagaatagccactatgacaaggttgtttgtaacaaattgttttcaaattgtgtttgttctatgttacaaatagtaatttgtcatatagattgatacaagcaatcttgccatagcaaacagattaagagaacagataaggagaacaaaacaatgatagattttagataagataagaggatttatatattatgatacttgattttaatgaacttttcaaagttgatgcttgcgtttccagttgttctaatagtatgataaatacaacaggtgtactggaaaacatagaagatatgaagaaaacagacattttggcaaaacatgggaacgagattaaatattatagtaccgacaaagaaagctactactatttccgtattccagacaaatcagtaaaagggggagcttaccgcagaaagaaaacaactagagagaaaatagaatctgcattgtgtgagtactatcttaacaaggaaaaggaacaactcaaatccttgcaagatgataacatgacattagagcaacttttctatgagttcatggaacacaagaaagaaaaggtcagcgtaggaactataagacgtatggtatatgactggaagagatattatcaaataaagccagaatttataaacaagccatataaggacatcacacctattgacgtggatgatttcctaaataacatagtgaacacaacagaaatcaaagacaaggcattctgcaatatgtgtggaatcctaaaacaaacttttggttatgcagtctcagcaaggtatatatcagcaaacgagaatccttaccgtgttgaggtaaacaaaaagaatatcatacgaaccagaaagaaatccagtaaggaagaagtctacaacgaacatgagaaacagttactctttgatgaactaaaccgtagattgcagaacaatccaacaaacacaaatatccttgctataatgcttgaattcgagttaggaacacgtagaggggaaatacttgcaattaagaattcagacgtacagaatggcaaaatacacattcacaggcaagttatagtagactgtgatatatcaactataagtaatcctaaactcactggatggcacgcagttgaatatactaagtcagatgcaggagacagatacatcccattaacacaaaaggcacaagagtatataaaacagatacaagagattaacaaaaagactggggaatgttatcaagattttttgtttgtacagaacggttacttagtaaatcccaacaagttatataatcttctcagagatatttgcaagcgttgtattaacattcctttaaagggaacacacagaatcagaaaaacatggatttctactcttgcatcacaagatattccattgagtgtagttagtaagatttctggtcatgcagatgaaaaaacaacaatgaagtattatgtttttaatacaaacagcgaagaggaaacaaagaagtcgattttgagtgctttaggggataacacaacatctagtaatgaagaactaaaaaacgtgacaaatcgtgacaacaacataattttatttccgaataataaaaaagcggaaaacccttgttataaaaggactttccactaataacatattttcttttggcggaggcatgtgagaatcgaacccacccgggacgtaccacgccccacactggttttgaagaccaggaagcacaccagttactcttctgcctccataatgcttagacaattcatcattgatgtatttattaagaaacggagcaaacgccagctgatatctggtcatccgctccgccatctgattctatcctaacagaatctttcctgtaaatcaaaattgcttacatcaattcctctgccatcttctcgatgtccgctttattctgctcatccatagaagacataatctttactgaagtctcaagccatgtgatattcttgctcttctcaaacatgcctctcatcactttaccagccatagaagcccaggatccgttctcaatcagaccaattgtcttattctgatagttacgctctgtcaagtgctcgataaatgtcttcatgagcgggaatacatctccgttataagttgttgaagcaagaacgatcttaccgtaacggaacgcatcttctacagcctctgccatatcctcacgggcaaggtctgttactacgaccttagggcatcctttttctttcagcttctcagcaagaagttcaactgccttctttgtatttccataaacagatgtgtacgcgatcataacaccttcagattctgttccataagaagaccatgtattatactgtccaatgtagtgctccagattctctgtaagaaccggtccatgcagcgggcagattgtctgaatatccagtgttgctgcaaccttcaaaagattctgaacctgtgctccgtattttccaacaattccgatatagtaacggcgtgcttcgcaatcccagtcttcctctacatcaagcgctccgaacttaccgaatccatccgcagagaaaagaaccttatccttgctatcgtatgttaccattacctccggccaatgtaccatcggtgcaaatacaaatgtaagctcatgttttccaagtgtcagtgtatctttattcttcacttccagcttgttctcgtctgcaagtttcaggtcacggaagaagtttccgatcattgtaaatgtctttgcatttccaaccacctttatattcggatatacttccagaaatttctgaatatttgctgaatgatccggctccatgtgctgaatgatcaggtaatcaggtgttgctccattcaatacatctgcaatattcttcagccactcatcgccaaaagctgcatccactgtatccataaccgcaattttctcatcattgatcacataggaattgtaagccatgccattcggcacgatatactgaccctcgaataaatcaatgttgtgatcatttacacctacatataaaatgtcatctgtaattctcatattatgctccttctctgccgaactatcagcagtcttttcattaccgctcccactgatctgtgagcagcacttttttcgttactgtacactctcgtgtgaacagtaaccttttttcttttattactgaatagagtatagcgcaaaccgccctcagaatcaacgttcattctcatattctcgtttcttttttggaaacatgattacttttcacttccatatctatcgctccactgttcaacacagattatgcgcattttgccttgaatccaaagattagaccatgcactcatgaagttcttctctctcaatccccttttcctgcattacatgcttgatctgttctaccgcctcaagcggtgccgcccaggcaagtccacaaccggccgagattactcttggcaccggaatcagtctgcccggtacctcctctgccttgcacgctttttccatcgccatcgcatccgcagttgtgtgaaatgtcaccacaagttttaattctttctttctcatttatgagatctcctgttttcctcttatctttcttaaaaaatcacagattgcccaggcaatactcatacctgccgcaatccccaatgcatataaaaatgtatctcgtccataattccatgcctgatgtaaattcccttcaacaacacttctcatacaataataaagcgtgcttcctggaatcagtggaatcaccgatgttacaaaaaatgaagtcgaagtactcctgcaactacgcgcaagtatctccgcatataagtcgattccaaaagctgctgccaatgttgggaagaacacacctccccagaatcctctgcagatgataaataacagccagcccagaaaaccgccaagtgccgccaatggaaggtgtttcttcttcatatgaaacagtatgccaaatgcaaccgaacccgctgcacctgtaaataattgaacaatatacgtcatcaaccaatcctcccaatcagaaatattgctccgataaatccaagtgcaagcactgctgcaagaagcattgcctctataaaacgcataaccccagatatcgtatctccaatcaatatatcacgaattgcattggttgccatcaatcccgggatcaataacataatatcaccaatcataatcttatccacgtgcagagccggaaaaaacctcgccataacacaaataaaacatcccgcaagaaatgatgccacaaattgaaacgtcacttcattcatgcaatactttcttatatgtctctgtgctccccagattaagatgcctgctaatccggccagtaatgcatcccaaagatttcctccatagaaaagtgcaaagctaaaagctgccagaatactccctgcgagttttcctgtctgtgtcggaacaactttgtcaatctgatcgaagacttccctgagttcttcaggagacataggattctggcaaaactgtctactcaaattattcaatttctccagcttctcaaaatcatttcctccggtctttcggattctccttgtctgagttcgtacattttcttctggaaattccattgtaataacaatactcgatgtgatcacgaacacattcatctgtgttgcaccgcatgcatatcccatacggttcaatgtatcttctacacgaaatatctccgccccgcttgaaagcagcgcatctccgatatcaagaaatacatgcagatattttgttgaaatatacatgctgttatcctcacattttcctttttctcaactctcttattataaccgaaaccagacaaatagaaaacattttttattactaaaatgctccctttaccaaattcacattcagtaaagggagcagggctttttactatttcattttactcgatcacaacagcaaatccatcttcgatttcttctactgttgttttctttccgtgatcctttgcaaatttctccacatttgttttctgatgtggttctgtcacaagaacctttaccggactattgtcacttttaatcgcttctgctgtcagcatcaatggttctggacaagataatcctcttgcatctacttctctcataactattttctccttattttgcttcgcttctcttgtttgtaaatgcgattacaaaacatacaataatacaaataattgctgcgatcttaccggctggcggaacagctccggctacaatctcacctgtctcagcattcagtgctgttccacttgctgccaggccaaggttatgtgcaagtgctccacctgcaaacataccgatcactgttactcctgcatcagatgatccctgacctgcaagtacaagctgacgcagcgggcatcctcctgcaagaactgctgcaaatcctactgcatacattccaagaatactccacaagtgctgggagtgagcgatcactccaggtgtattgaatgcaagaacaaaatgtcctgttgcaacattatatacaagcataactgcgaagaatcctacaacgattgtgatcaggtcaaagttcttcataagaatgatatcacggatacttcctgcgaaacacattcttgatttctgagcaaatgctccaaagagaagtccaccgatcaaagaaataatgattggtgcatgcatacttcccggacctgctgtactactctttaaaagatttgttccaagtgcaagtacaagtactccgatcataagaagtggaagtacacttccgctcactttatttgtcacatgtgcacgcccaaggctgaaacctttcttcagtgcaaacacgcctgtagcaacaccaagagcaaatccgatcagtgctacccatgcattcagatctccggctgacatacgtatcaccatacgaagcggacatccaaggaatacaagtgctccgatcacaagaatcattccgagtacaaaacgtacgattgtggaagatcctgctgttgcacgatattcttttgtcgcaattgaaataataaatgcaccgaggacgattccgatgatctccggtcttgcatactgtaccggctctgcggaatgaagtccaagtgctcctgctgtatcacgtacaaaacacgcaatacagattgccatgttcgctgggttaccaaaataagcaagtgttgctgctaccagacccattacgacaccggcgattcccagtttcttctttgaatcaaacaaattcatttccttttcctctctttctctacaactcttttattgcacgaattgcaaaatcgacctcttcatctgtattgtaatgagaaaaactgaatcggacagctccctgttctactgtaccgagtgctttgtgcatcagtggtgcacaatgtgctcccggtctggtcgcaatcccataaacttcatttaattcatcactgacttcagaagagtcataatctcccagattgaaagtcacgatcggagctctttcctctgctgtaaaatctccatagactttcacatccgggatctgagaaatcccatcataaaacctgcgcatcagatgaagttctttctcacggatcacattaattcctgtacggttcagataatcaatcgctgcgccaagtcctgcaatcccatgcccattaagagttccggcctcaagtgccgtcggcatctgggacggatgatgcatgttataagtatccacgccacttcctccacacagaagcggacgaatttccacaccttccctaacataaagccctccggttccctgcggtccaagcagacctttatgtcctgtgaagcacaatacatcaaccccaagttcctgcacatcaattggataaacacctgctgtctgagaagcatccacaacaaacaaaatatgcttcttcgatgcaatctgtcctacccgtttcagattgatcatatttcctgtcagattcgaagcatgcgtacacacaattgcttttgtgttgtcccgcaccgcattctccatctcttcatatgacagatttcccttttcgtcacagtttagaattgtaagctctactccctgttcctgacaccaatacagcggacgcaataccgaattatgttccagcactgttgtgatcacatgatcgcccggttgaaacaaaccttttaatgcaatattaagactctctgtagaatttgcagtaaatgcaattcttgtcggactttctgcattgaaaaaatctgcaagtttttcccttactgcatagatacttctcgaagcatccagtgcagcttctgttccgcctctccctgcattccccatatgctcgagagcatagagaatcgcctcttttacttcttccggtttctgcaatgtagttgccgcattatccatgtagatcatagggcttctcttcctttctgtatgtgtttatatcgtttactttttagatacaaatcactagttatagtatacttctcttttctgtttccgtctaataggaatccgtaatggatctgctctatttataggctttttctataaatagggcgtgttatttgcattcacctatccctgtattttctttcttcaaatacattctctttatcatctttataaaacgctctgctgccggaagcaacggatattctgcatcatagacaaggttgatcattctctttccaccttgactgcccagtggaaaagccagaagtgttccatttttcaattcctcttctgccgcaagtttagacaaaatcgtaactcccatccctttacttacagatcttttgatcgtctcctgattctccatcaatgctgccagcttcaatttttttatatcaatcccttgttctgccagcattttttctgcttctttctttgttccggatccttcttctcttaagatcaccggctcgtccatgatccaatccgccaatatttgtccaccacaaagcttttcaacaaatttctcatttgacggagtaagcacaactaattcgtcttcataaaatggaagatatttacagtttcctttctcaatcacggttcctgtaaatccaatatcaatatgatgggaaagaatcatatcgataactcctttactgtctgtctcaaaaagcttcaatttttcaccaggatattctgcatgaaatgtagacattacatttggaagaatatattgcgccggtacggttgaagcaccaatacgaagtacatttccctccggttttatttcttttccaaaccgtccttttattgtcttttcgatttcaagcatttgtaccgcataagcataaagctcttttccactctctgacagctcaactcctcttgtatttcttataaggaaacaggtattcagttctttttctaatgcagacacatgtgcactgatagttggctgcgtaaggaataactgctttgccgcttccgaaaaactttttgtttctgctactttcacaaatgcttccagttgttttaagttcattcactctccccttactttcctctgatttgttctctttgcaatttatttcctgcggagcgttctgtctgtgcaccttcttttgctgtaaatccgattcgatctgtatattcaaaaatcaatctggcattttttctgcttgtctgaaatacttctttcacctgactcagtgtaatcactttagatacagataacatacggcttacttctgttctaattttaaacgtaatctctgttgttgtataaacactctcacaaacctctgtaatttcgttttcttcctgcatataattcagaatttccatcaattcatcttgactttgtattccacttttctttttcgtttttcttgctgactcaaaaaatgtttccaattccactttgttcaaaaagaaaactttattctcatctgattgactggcaaagatttctcttaatttagaaacttcttccgtctcttttactttatatccctccggagaaatcagctctatactggaattttcctgttgcaaccttatacaaccgacatttccatgttcctccaatagtataagacatttctgaatttcccgattctgttcctttttccctttgctgatctgattgaaaagaactgtctttggcattcctcttcgatatggatgagcagacaaccagctttccaattcatccataattctcttttctaaagaaatctgttcctgcaggctcttttctcgatctgggatttcctttgaacacttattttcttgattccaaagattgttttccaacagttccagtctttgtaaaaccccatcatgatattttcgctcttttttttctcccatttcaaggataattcctcctccgattgtctcgagtggtgaataaaatcggacaataaacctgtcccccggacaaaacgcagcaggttcttctaaccttaattggacataggctgattcccctggctcaactttctcacaggacaacggaactgctctgcacagaacttctgttgttccgctataaaaatgtaatcgagtctgatgttcaacacttcttttactttgtggaagaagggtcagttttgcattcacatagcggctgactttcatacttccttccggtgcaatcacatttcctcgatacacaaacttcccatcactgctctgtcttcggtccgtctgaaccaggttcagtgcgcttcgctgacctgcttcacaagcttctgcctcctgctcatgcacctgaactccacgaactctgcacgaagtttgttgtggatagatcatcacccgatctcccgaatgaattttcccgtcaagaagtgttcccgtcacaactgttccgcttcctttaattgaaaatactctgtccacaggaagtcttggaaatgcagggattttccacatttctttctgcttttttacacatttcaggatttgatttcttaattcttctattccggctcctgattttgctgaaacacgtacaatgtccacattatattccagcttatcttctacctgatcatttctctgacctactgtaaacagctgctgcatttcttcacagatctgctgttctatcatctccagccattcctcatccacaaggtcacatttattcaaaacaacaaggatattctcaacaccgagaaggcgtaaaatttccagatgttctcttgtctgtggcataactccctcatctgctgcaattacaagaagaacaaggtccattcctaccacacctgcagtcatattagagataaatttctcatgaccgggaacatcaatgattccgacacgctctccgtctgtcaaatccatccatgtaaaccctagatcaattgtgattccacgtgctttctcttctttcagacggtctgtatctcttcccgttaatgccttgatcagtgtcgtcttaccatgatcgatatgtccggcagttccgatgatcacatgtctttccatctaatgcagtccctttcttaatgctgtttttctttcttagttatgctttctttccataatatgtctgatctgtgtcgccagatattcgattccttcttccgagaaagttctcatatccagaaggaaacgcccttcctttattcttccaattaccggaactgaaagatttctcatcctgctttctaattcttcaacggtgatctcagttgattccaatgctactccataacttggaatctccgtctcaggaagtgcaccgccaccagccttagaaatacatttttccacttgaatctgaacggacgctccctcttgattccatctatcagcacagaccattgctttctcttttatttcctccacaggtcttgtcagcattctcagcgttggaatcttttgaactgcttctttctgatccagataacatttcaacacttcttctattgctgtcattgtaaatttatctgctcgaagagcccgaagcaatggatgattacgcatctgatcaatatattttttctttcctacaaggactccggcctgtgctccaccaaatagtttatcaccactaaaacaaacaacatctgcaccggcctttacttcttcctgtacggttggttctttggataaaccatattcctccagatttataagtacaccactgcccagatcttcaatcactggaattccgcttcgttccgtatgattctcgaagttttcaggtggcaattcctgcgtgcactctatcagaccagtacttaattcatacaattcttctgcacttaccgattctgtaaacccgataattctgtaattacttgtgtggactttcaaaaatgctttcgtcttttcactgactgctgctttataatcttctatccttgtacgattggttgtcccgacttctttcaaaatagcaccgcttaattcaagaacttccggaatacggaatttccctccgatttcaacaagttctcctctggagacgatcacttctcctccttttgtcaatgcactcaaggcaagaagtacagctccggcattgttattcacaacaattgccgcttctgctcctgtgatctgacaaagcaattcttctgcatatccggtcctgtttccacgttttccagtctgtaaatcatattccagactggaataattctctgcaactgctttcagtttttccgcaatctcatgactaagcgttgcacgtccaagcccggtatgaaggattactcctgttccgttataaactggttggatctcctttttctgttcttgttccagaagatggttcacttctgatttctttgaacttgattctatctcatacagaaatttctgaatcatttctttcgcttcatgctcactggttccctttttgattccttgtgagatttcatttctcaaattctccacagaatctctgactgctccgagaacacgctcatatccttctttctctgccagtctctgaacattttctttcttcatcaagtcatctactcgcggaagcaggcgaaagatctgattcttttctttctgtaaattttctcttttcttattctgatctgacttttccaactactgctgctccttaatttctctttctacagcgaaatgccgcaagaaaccgttactgctcacagaacactgtgaacagtaacaagaaatctcttacagcatttccatttttcctttttttagttggatgagtttttcctgccgctctttaacacagcctacaacagaaactttcgtctccattcccactgcctcaaagtctgctaacagactgtctaattcttctcttgggacactgacaagaagtcctcctgaagtctgcggatcgctgatcagatctaaatagacctcttctacgtctcctgcatccagcccttccgctgcaaactcccggttcttatatgctcctgccggaacgagtcccatccttgcatatgcaatcgcttctgtcatatattcaatctgctccggatataattccagagttatgtcacttgcctcagccatctctgtacaatgtcccagcaatccaaatcccgtcacatctgtacatgcgtggatcgtgtgtttctcaattgctcttttcgccctctgattcaatgaagccattactttcgcagcttcatctgcggctgcttcggaagccatctgtgctttcactgttgtattcacaataccacttccaagctgtttggtcagaaccaacacatctcccggctgacacccgtaattcttataaatcttatccgggtgaacgaagcctgttaccgagagtccgtatttcggttcatcatcctgcaccgaatgacctccgaccagaacggctcctgcttctaacaccttgtctgctccgcctcgcaaaatctcccctaagatctccggatccagacaatttggaaaacatacaatattcaatgcaaccttcggctctcctcccattgcatatacatcgcttaaggagttcgccgctgcaatctgtccgaacagatacggatcgtccacaaccggtgtgaagaaatccagtgtctgtatcatggcagtctcatccgatattttataaattgcggcatcatctgatgtctcaacaccgacaagcagacgctcatcggaaaatttaggcagcttacccagaacctgggcaagggtctcaggaccgattttggccgctcaaccagctgtctttgtcatctgtgtcagatgaatctctttgagtcccttactcatttcgcccacttcctttcgaatgctttttcaaaataattccctcgatatacaaaaaagctgttgcagcagcttttccatcacattttcaaattactgtaactgttcctatgtttctaacaaggtttcacaatcttacctgcattattcatagactcgacaatgtcatacatatttgtaactgttcctactgcaagcttgtctttcattccataataatccagacatgttccgcaagtcacaatctcaacgccctggctttccagattcttcagatcctccagagagtcagatccttcacatgtgatcttagcgccaccgttgtagaagatcatcttctttggaagctcatcaagctgtgtgattgcaaagatgcaacctttgatcagcacttttccgagctcatcatttccacttcccatcttgtcagaagaaatcacaactaccgtatcccctgtcggaacacaatcgcaaaccgcacccgccggtgctgtctgagttccttctcctgcaagtgcctggattgtcactttatattcattctctccaagcttctcctgtgttactgctgcgcctgtactctgtgccatcttagtcacattagccactgctgtctcattgtcaacgagaacttctattgtctccggagctgtcaaagcatctaatgctttctttgtcttgattaccggaaccgggcatttatctcccatagcatttactgttaccattctattgctctcctttacctattcgttcaggtatttcaacctccaggcttctgtttttcagtataacatttttactataggttatcaaactattctatagaaattctctataaatttccttctttctgattcacatttttacgcaaagcttctcccagctctgtaatacacagtaacgtgatcacaagcacaattcccggaatcagaatgatccaccaggagtttgtcatcaatgccttttcagaaagcgagagcatgctcccccaggaaatgatttccatcggaagaccaatcccaaggaagctcaatgttgactctgctatgattgcacttctgatgttcatcacgaccataaacataattgacgaaacaaaattcggcagcaaatgtgcacgtaaaatatgccagaaacttccacccatacattttgcagcaatcagatattcactctcgcggagctgtcgtacctcagtgcgtaccatttttgcgatattcatccaactggtcagaccgattacaacggtgattgcaacaaccgagttctttcctgccagtgcctgaagaaagataattaacagaattgaaggaatactcaataaaatttctgtaaaacgcatcatcagttcatcaatccactccggtgcgattccactgaaggatccgtagatcaccgcaatcgtagtcgataacacggtggatatcaacccgataaacagcgatattctaccaccgtataaaatcattgaaaaaatatctcttcccatcgtatccgttccaaaaaagaactctttattcggtgaaatgttgcagttcttcagatccatgtatgtagggtctttcgtcataaagaaacgacagaaaacacaggcaaatacgatgactgcaagaatacttccggcaattacagaagacttgttttttccaaaatcattcattttgaatgtccttattctattttcggatgaactattattcttctcagcttttctcatcttctccaccttatatttgacttgcctttcctgtcatttttatctcttttattcttggatcgatccattcactgacagactgtccgatcacatttcctgcaataacaaaaataccggtaaatacgcaaagcaccatcagcatattatagtcatgatattttgcactttcaaaagaaagcgttccgattcccggataggaaaataccatttccacgatatacgtcccttcgatcacatgctgaagtgaaattgccatcagactgataaacgatggcataatatttttcacacagtgaaagaacaatactctttttcgtgacattccttttgcctttgccagtaaaacatagtcttttctagtttcttccaacaatcggttacggatcagatacgcataataccaaaggtggctcagcacaacaactgtcagcggaagaatcagatgcgtcaatctgctcaacggatttgccgattgtccgaaatcatatgccccacttcccggaaggagctttagattcacactaaaaatcaaaatcaatataagtgacaaccagaattccggaatacagcttgtgattgttcccgccttacgcaaaatccggtctggaagctgattttcataatacacacagaaaattccaagcaaaagtgccagtccaaatgtcaggataaaaccaattccgccaagcaataatgtattgactaaacgtccctcgatcaccgtaagaacatcttgtttatatttataagagattccaaaatccccatgaaaagcatttccaagccatttcacatactgaacagggataggttcgtttaatccaagtcgttccattgcatgctcatgttcttccacagacatcctctctgcacgctctccataataagaaaccagcggatccccgggtgccagccgcgacattacaaacacaagaagtgagagcacaaaaacagatagcaagatcagtccgatttttctaagccattgtttcttcatcactctgctcctctcctgaaatctccggaatcggaatcgcctccagaagtttcttcgtatataaatgctgcggatgttcaaacacctgctcggtttctcctatctccacaagttttccatccttcatcactccgacacggtcgcacaacagacgcaccattgaaagatcatgcgcaataaaaaggattgcacagtcatgttctctttgtaaatgccgaaacagcttcaccatctgtgcctgtgtagttacatccaacgaagcgattggttcatctgcgatcaagagcttcggcttcattgcaaatgctctggcaattgcaacacgttgtctttgtcctcctgataattccggtggtcgtacctgaagctgttcttcctctaattctacctcttccatcatttcacatagaaatttatgctgttctttcctgtcagaaaatactttatgtatttccaatggctctgcaaggatcttctttaccttcattttctggtttaaggaagatgttgaatcctgaaaaatcatctgcctctctttttgcagtcttctcgcatttttcttttttgcttttttatcaagaagatttatcccatcataagaaaatgtttctgcttctggacttagaattcccatcagacattttccaaccgttgactttccagatcctgactcacctaccagtccaaaaatctcgtctcttcttatctcaaaggacacatctttcaccgcttgaaacaccctttttctatccaaaggatagaagtaggacaaatgtgagatttctaccagtttttcatgcaattctgattcacttattaattttgattcatttctatgcatataataaggatgatcctgaatcaatttctttgtataagaatgttttggagctgtgaaaagctgttttgcttcttccaattccacgatttttccattctgcattacagcaacccggtctgcgatctgagcaacaactccaagatcatgtgtgataaacagaatacttaaattcaattctttctgtaattttttcaacagtttcagaatctctgcctggatcgtcacatccagagctgtcgtcggttcatccgcaattaaaagctttggatttgaggcaagtgctgttgcaagcacacatctttgacgcattccgccggaaaaatgatacggatacagatcataacgctgctctgcgtctttgatcccaacgagcttcatcagttcgattgcccgctcttttgttgatttcttcttatttttctcgaaatctttctctctttttttctgatttaaagctttttcatgcagaaaaatagcctcttccatctgacttccaactgtcatcgtcgggtttaacgtgctctgtggatcctgaaagaccatcgcgattccctgtcctcggatctgctgcatctctttttcattatatccgatcaggttctgatctttatattgaatggcttcgcctgtcacagaggcactctttggcagtaatttcaaaattgatcggcacaatacagtctttccacatcctgactctccaacaagagcaaggacctccccttgtcttaacgacaaggagacgtcctttactacttgtttctttccatctgaagtttgaaattcaactgacaaatgcttcactgccagtatttcttctattttcattcgattgtccaatcctctacattccagaaaattccaacaccatgatggccaagaactgtatcctttgtaattccctggatcttcttattcgtcacataatctacatcgcaataacagaagaatgtatatgccggatcttctgcaagtgcaacctgaaactttgcatatgcttctttacgctcattctcatcacttgtctgtcttgcctgtgtcagataagtgtctacctgttcattggaatatccactgtaattacttcctttatctgtaccaaacactttatatgtatggtcatcagcatcaaatgggcttccccatccgatcaaaaatgcttcctgatttgcccagtcgatttctgactgaacctgtgcttttgcatcaactccaacttctttcagctgctgacatgcgatagccgcaagatctgcgcgcacctgatcaccttccatcacattgattgtaaaagaaagcttctctccgtttctctcatagattccgtcatctcccaatgtccagccagccgcttctaacacttcttttgcttttgccggatcataagagtatttctctacatcttcattattatatttatttctctgaagcggaccataagctacaattccttctcccagaagaacactgtctaccatcttctgacgatcgattgcatagctgattgccggaattgcatctttgttcctctgccagaactcattattaaagttataaaggatacccctgtaatctgctgtcttcatatcatatactgtaaaagtatcatcatctgtgaaattctgtgcatccttcggtgtcacctttgccagattgatctcaccggattttaactgaagtgcctttgcattatcatccggtacaatcttaaacacgatcgtatcaatcttcggagctcctttataataatcctcattctttacaagtgtaatactctgtccttcatcccactcctgactcttatacggacccgttccgattggattatggaaatattcatctgtctgcatatccttgctttccagtaagtgtttcggaaggataccaattgtcatatagtcgagaaatgccacattcttatcccgaagtgtaaaagaaatcgtcttatcatcgatcacattgattgctgtaacatcctcataattagaagcaatctctgattcattgtccggatccatgattgctttgatcgtaaactcaacatcatctgctgtaaatttctctccatcatgccaatttacatcatccctaagatggaatgtataagtatttgtcgcgtcatccagctcccatgattctgccagtcccggtactacctcattattctcatcatgtgctgtcagaccgtcaaacagaagcagattaatctctccatgctcatcaatagccggattgatccttgtgtaatcattacttccatagattaatgtagacccgctttgtgtagtctctttatttgcattgtctgatttgcttccacagcctgtaagtacacaacctgccaacgtgcagactgctaaggttaccacgatcacctgtgatagttttcttcgtttcatcgttttctcctcatgctgtctattttctttcaatgcaatttattgtataagaaacagaataaacccacaagccaggtggggggatataagatgtttttattgctcgattaaaaaaactccggtgattccaaaaaacaccagagctttaaatcttctatatctagttttatttttaactttcttttccttcacccgcaaagtattctttcacaagctttacaactacacctgacaataagaatactgcaatcaggttcgggattgccatcagaccattaaatgtctctgcgatattccacatcaatccaagttccattgtagcacctacaattgcaacgagtgcatagagtaccatgaatggcttattcgcttttgtaccaagaaggaattccacacatcttgttccatataatccccatccgataatcgtagaaaatgcgaagcagcacattgcaaccgctgtaaagatagatacccagtttccataagtggatgtaaatccaagaatagtaagttctgctcctgccgcctctccatatccaaccggaacacggctgcacagaataacgagtgctgtcaatgtacagattacaatggtatcaacaaatacttcaaagattccgaaaaatccctgctttacaggctttttcgtatctgcacatgcatgtgcgatagaacctgtaccaagtcctgcctcattagagaagattcctctggaaacacctttcttcatactcataaagaaagatcccacggcgcctccggtcacagatgccggtgaaaatgcgccttcgaaaatggatccaaatacgctcggaatgttctggaaattcagaacaacaacgccaagtgccagaatcacataaattgctgccataaatggaacaagcttttctgtaacctgtccaattctcttaattcctccaagaaggatcatgccgatcaggatagcaagtacaattccgataatcagattcaatgttccaacagaatccttttctatgattccataattaaaaagtgcagaatcgattgctgttgtaattgtattcacctgtgttgcatttcctgttccaaatacagtcagaactccgaatgcagcgaacagataagccagccagtgccaatgctttttcagaccatttttgatataatacatcggtccaccgacacgatctccttccgcattcgtctcatggaaatgaactgcaagagtaacttctgaaaactttgtacacattccaagaagtgctgagatccacatccagaacactgcacccggccctccgattgcgattgctcctgcaactccggcgatatttcctgttccgaccgtcgccgccaatgcggtacaaactgcctggaacggagtcagtgcaccgtcagatgcatctcttttgcggagcatccttccgatcgtcactttcatcgcatacggaaattttctgatctgaaggaagccggtccggatacttaagtaaagcccgactccaataatgcagatcatagccggaacgccccagataaagttattcacagcactatttactgattctatcgtagataacatacttctctaattcctttcttttatgatattattacgtcgactgttcatcacattaaatcgataaatcattaaaataacttttaaattataccataaaagtggggaaatgtatagaattattccaatacttctttcgaatcaaactgatccataaactccgcatattttgctgaattttcaaataccggcttataatttttaacaagctctctgcttcttgctgctttttctttcaaaagtccataggctccaagtgcaaacatcttcgcagtgacaatataagcttcttcctcatccgtcacttcaaattctacctgatggagtccaccctttacaccacctgtattaaatgtatatacaggcattaagtgctggacatcaccgacatctgtagatccgcccgtatgtcctgatgcctcgatcacatttgtttccggtgcagaaagttctgctgctctttttaattctgggagtgcttcttccgcaagtgtcggaagatatcctggaagtgttgtgatttcaaccttcgctcccattgcagtagcccctgcgtgaaaggatcggtctgttttcttcgctgcatctgtaaatgcctcgattgttttagctcttaccaatgtctctactacaacttcatcaggcactacatttaccaggttgccaccctttgtaatgatcggatggacacggacacaatcctcatcacggaatgtctctcgattcagaccgagtgcatgcagaccaagtgacgccgccgacagagcatttacaccttgttccggtgttcctgccgcatgggctgccttacctaaacaacggatcactttagatacaaatccatttccggttccacttcctactatgatgtcatcccccggtgcaatgtgatgtgtaatacaaagatcaatatcatcaaatgcgccgatacgaagcagctcacattttccaccgccatattttatttttccctgtgcacgcagctcatttttgaatccaatttcaccatactcttccgccggtgttgcaaaaaataccacctgtccatccagtttttccgcgatctccggaactgtaagagccagtgccgcaccaaagattccagccatctgtgcatgatgtccgcagcaatgtgccgcatctgtctcaggattcgcatgcgcatgctccggaatcctaagtgcatcaagttctccaagaagtgcaaggcttgctgtatctttcttttcttcatttaaatacgcttttgttcctgtaattgcaagtcctgtctctgtgcgcagacctaattctttcatcttctttatgaatttttctgctgtattgaattctttatagccaagttctccatgatcgtatatatctctggcaaattcaatgatctcatctctgtgctgatcgattgcttccaggattaatttttctgtctgatccatttttctcactgcctttcttaattattgaagctcctccgggatccaccataatccatcattgttttctttcatatactgtttgaattcatctgaatggtatgcgtccacgattgcctgtgcccaatctgcatctttgttctcttcttttacaacaacctgaagtacaagataatctgaaatatcttcattggccagtgctgtagaagcatcaatgcctgcattatatacaacacttcctgtgattgcaatataatcaaaatcagattctgctgccggaattgtcatgctgttcatttctgtaaattcaatattatgtgggttctctacaatatcatcctgtgtaactgtggatggatcagcattctcgtcaagcttgatccagccgattttctgaagcatcagatagcagcgtgctgtgttggacgcatcatttggaactgcaaccttcgcaccatccgggatttcatctacagaatcgtatttttctgaataaactcctgccggaacagttggaatcggactgattgcaaccagatctgcgttataactctgattgaaactgtccatgtatgctgtatgctgttctacattgacatctacatctccatcattcaatgcaacatctgctgtctgaagatctgagaggtcaacagctttcagagtatatccttctttttcaagaattggaacaattgcatcttcgaaaagttctgtatatggtccctgggattttccatagacgatttcctttttctctgatgtatccgcgtcacttttcttcgtatctcctgaacctgaatttccgcatgctgccaggctgaatgctgttgtcgctactaataatcctgcaataattttcttgattttcataatataattctcctcgttctttcttaatcaattatctatgttgtctgagttttcttgaaattgtatttcctgcaagctgaaggatctgtacaaatacaaccagtacaactacagtaaagatcatcaatggtgtattcatcctctgatatccataagtcagtgccaggtctccgacacctcctccgcctacatatccagccattgctgatgctccaagcaacccgatcgtacctgttgtcaatgcgagtacgatagatccaagtgtttccggaagcagaaaataccgaatcgtctgccaggtagatgcccccattgcttcagccgcttccagaatacccggattaatctccagtaagctattttccatcaagcgtgcaagatatggactgatataaataacaagcgggacaagtgatgctgtactcccgatggtcgttccaacaattgcccttgtcaacggcatgattgctaccagtaagatcacaaatggaatacttcttactatattaatatagatacttacaatattgtaaaggatcagattctctatcagtcctcctttacggcaaagtacaaggatcaatgccaaaataattcctatgattgttccaataatcagtgaccatgcaaccatatataatgtctgtccaccactggtcagtaacttttccagtgatactccaaaatactcttgttccattaaatcgcctccactctttctctgattactccattctcatcaatctgtttctcagcttctaatattttctcttccgttccgatcagctgcaaaatgaacacacacattacattctcctgcaattcctgcacggttgctcccagaatatttactacaattccatccacatgacagatatctgaaatcacaggtcgttttacactgcttccgataaacttaagcctctctacccggaaatgttctttctgttctttcacaagacttagaatgctttccggaatctgatcatttactacagtctgaacgaatcttcttgtaacaggtgcctgtggctttccgaatacatcaagcacacttccggcctctactacttgtccgttctccataactgctactttattacagatcatctgaacgacctgcatctgatgtgtgatcagaaggattgtaactcccatctcccggttaatcttcttaagcagtttcagaatggattctgtagtttgcggatccagtgcacttgttgcctcgtcacagagcagaatgtccggtgttgttgtcagtgcccttgcgattcccactctctgtttctgtcctcccgaaagctggcttacataaacatctttcttatcttccagttctacaaaccggagtacttcttttactttcttatcaatctcttcctttggtgccttttcaagaatcaatggcaatgcaatgttgtgatacactgtttttgattcaagaagattaaattgctgaaaaaccattccgatttttcttctaagcttgcgaagctgcgtttttttcagattcccaagattttctccctggactataacatttcccgtatccggtgtctctaatccatttactaaccggatcaaagttgatttacctgctccggaaaatccgataattccgtagatgtcacctttctctacatgaatgctgacatcctgcagcgcatgtactgtaccgtatttcccggaaaatgttttgtttgcatgttctacttttatcatactcatcactccatctatcatttgatgtaacgttgttactttttcgcatctcagattcgataggcgtatgatacaccttattaacctactacgtcaataggttttatatgttttcggcgttttgttttcatattcctatctgtttagtgggttattagtgcattttaaccagtcgtattataagaatgcaggtcacacagagtgtgaataataccggttgacaatacctgatctctgaatctgaaaattttcattgcattaccataggactttctattataatagaaatgttatagacgatataaaacgaaacaatttcaaaaatgtatcgttttttgagattgtctctgtatgattacaagtattttttgtagaaaggattaactaattcatgtggattgcagatagttggaaagattacgaaattcttgactgctcaggtggcgaaaagcttgagcgttggggaaattatcttcttgtccgtccggacccgcaggtcatctgggatactcctaagaagaaccgcggttggaaagagatgaacggacattatcaccgtagcaaaaagggtggcggtgaatgggagttttttagtctcccacagcagtggcagatccattacggttctctcacatttaatttaaaaccatttagtttcaagcacacaggactcttcccagagcaggcaactaactgggactggttctctgagaagattaagaatgctggacgtccggtcaaggtgctgaacctttttgcttataccggaggtgctacacttgcagcggcagctgccggagcgcaggttactcatgtagatgcatctaagggtatggtgacatgggcaaaggagaatgcggtttcttccggtctgggagatgcaccgatccgctggcttgtcgatgactgtgtgaagttcgttgaacgcgagatccgccgtggcaacacttatgatgcaatcattatggatccgccgtcatatgggcgtggaccaaaaggcgagatctggaagattgaagatatgatccatccactcatcaagctttgtacaaagattctttccaaggatgcactgttcttccttgtgaattcttatacaacaggacttgctcctgccgtacttacctacatgatctcaactgaattaaaaccttggaacggacatgtagattctcaggagatcggacttcctgttacagattcaggattggttcttccatgtggtgcttccggtcgttgggaacgtgactagcagaatcccaattataattcgtttgttactggcttcaaatttctgagtcagtggctataaattgtacctgtgcaaaacgttactgctcacagtaacttctaaacagctacagcaatattctaaacagcagaaaagaccagaggttcttgtttcaatttgtaaaacaagcctctggtcttttcatttatttatgctgttcttgaactcccctgacagatttcttcaaactcttttaatttctgtcttgcctgcaaacttaagtttcttggcacttcaatctgaatcgtcacatactggtctccgtgaacggatgaatctttcatcgaaacaattcccttacctctcagacgaatcttggaacccgattgtgttccctctttaatcttacacataacatctccatacagtgtatggaccaatgcctcacctccgaacacagctgttgtatacggaacagatacggttgtatatacatccatacctttccgctcatatccaggtttcggagcaactgttactttcaacagaagatctccggcttcaccaccaccggttcccggcattccctttcctcttaaacggattgactttccgttatcaatacctgccggaatatgaaccttcagtgactgtcccggttgtcccggattttccggattactcagtgtaataaccttatctccaccaaatgcagcctcatcaaatcctacagtgatacctgccttgatatcagaaccttttgatctaaagctttcacctccaaatcctccggtaaatcctgatgtccttctgctgcgacctgaagcacttcctccatggaacatatttccgaaaatgtcatcaaacatatcatccatgtcgccaccttcgaaatgatactcctgatatccacttcccggtccaccataactacggtaagtaccgcctttgaatccgccgtttccgccgaatcctccaaagccacctgtaccggcatttccgtatccggaacctgcagcaccgctctgatcaaatgcagcatgaccgaactggtcatacagtttcttcttctccggatcactcagtacagagtacgcctccgtcacttctttgaatttcttctccgcttctttatccccaggattcgtgtccggatgatacttcttcgccagcttacgatatgctctctttatttctttatcctctgcgccctttgacagcccaagcacttcataataatctcgtttcattctttccacatccttccgaatctcttattgttttgaacatatatagtttattatttctctgtgttctacttgtaatatagcagacatttttcagactgtcaatatatcaatcttaatttcaatattaggtcaataaatgtatctgttccatttacaggaatcttaacagacaaatcaatttttatttcaacaactctcgcagcacctgatttaccattccaggatttgctttccctttcatggcgcgcattgtctgtccaagcagtgctccgattgctttctctttaccgcctttgaagtctgcgactgcctgtgggttgtctgcgatcactttagcagctgtctcacggagtgcaccttcatcgttcaccatcttaagcccgtgttcttcgacatatttctcaggatctatatcctcatggaaaatctgcttgaatacatcttttgccacagaactgttaatggttcctgcctccgcaagatcaattaattttgccaggttctccggagagaatgttaaatcttccggctccattccattgtctttcatcagacggaaggtctctccgatcagccagtttgcaactttcttcggtttctcacagattgctgttgttgcctcaaaaagatcggccattttcttagaacctgtgatgatctctgcgtcatactgcggaatatcaaactgttccttgtaacgctccagcttctccgtacgaagttccggctgctgagatttgattttctcgatccattcatcactgatcacgatcggaacaaggtctggttccgggaaataacgataatcctgtgcatcctctttggaacgcattgcataagaatgctctttgttgtcatcccagcgtcttgtctcctgtacaacctgttttccttcttcgatcaactcaatctgtctctgacgttcgccttcaattgcatgtgcgattgccttaaatgagttcaggttcttcatctctgttcttgtaccaaactgatcggatccgacttcacggacagacaggttgacatcagcacgcatagaaccttcctgaagcttacaatctgatgcgcctaaatactgcacgatcatacgaagcttctcaagataggaaataacttcttctgcggaacgcatatccggttcagatacgatctctacaagtggcacaccgcttcggttataatcgacaagtgaagtatcatcccactcatcatgaaccagcttacctgcatcttcttccatatgcatctcgtggattcttactttcttctttcctgaaccactctcgatctctacatatccatctctggcaatcgggagatacagctgggaaatctgataattctgcgggttatccgggtagaaatagtttttacggtcaaatttgcatacctgtgtaatcttacagtttgttgcaagaccaattgccatagcatattctacaacttgtttattcaacaccggaagcgatcccggcataccagtacataccggacaagtatgtgtattcggtgcgccaccgaattctgtgctgcatccacagaagatctttgtctttgtagccagctcaatatgcacttccagtccaatgactgtttcatactgctttgccattgttaacgcacctccttttctgacataagaccgacatttgccggtgtttcatgcatcttctttgtcgcacactcataggtatatgctgcacggatcaaagttttttcttcaaatacatttccaatcagctgcataccgattggaagtcctttgctgtcttttccaaccggaacgctcattcccggaagacctgcaagattgactgagattgtataaatatctcccaaatacatcttcatcggatcacttaagctctttccaagctccggagcagttgtcggtgctgccggtccgagaatgatgtcataattacggaatgcacggtcaaactctttcttgattaaagcttttgttctaagtgccttcagatagtaagcatcataatatcctgaacttaagacaaaagatccaagcatgattcttctctttacttcaggaccaaatccttctgaacgtgttttcttgtacatgttatgaagtccatcgtaatctttcgtacgataaccatatttcacaccatcaaaacgttccaggttagaacttgcctctgcatctgcgatcgtataataagcagggattgcatattttacaagtcgcagatcaaacgcctcaacaatcgcacccttttcttcgagtacttttgctgccttcatcacagcatcatttacttcaggatccagaccttctcccatatagtctcttgggattccaatacggagtcctttcacatcatcgacaagtgcttctgtgaaatcacaatcatcacgatccatggaagtgctgtccttcggatcatgggatgcaattgtttcaagaattgccgcacaatccgatacatctttcgctaccggtccaatctgatctaaagaagatccatatgcgataagtccatatcgggaaacggttccataagttggttttagtccgacaactccacagaaagaactcggctgacgaatggatccgccggtatcagatccaagtgcataataacattcggatgctgccactgccgcacaggaaccaccggaagaacctcccggaacatgcgctgtgttgtgcggattgcgtgtcggtccgtaataagacgtctctgttgtacttcccatggcaaattcatccatatttgtcttaccaatgataaccgctcctgcttttctgaggttctcaactgcctctgccgtataggtcggtttgaagttggaaagaatctttgaactacatgtggtaagctgtccctcgatacacatattatcttttactgcaaccggaactcctgcaagtggacctgtcagttcgcccacatctattttcttctgaatttcctccgcttgtgcataagcaccttcttcatctatcgtcacaaagctatgaatctctgactccgcttctttgatctgtccaatcactgcatcgactgcttctcgtacagttacttcttttactttgatcttctcgcccagttcaagggctgtaagttttaataaatccatctgctctcactcccttaaccaattgtcttcggcacttcaaaactgtcctctttacgaagtggtgcattcgcaagtgttgcctctttgttatcgccatttgtcaccacatcttcacggaacacattctgtaccggaaatacatgagacattggttcaatccctgttgtatcaagttcatttaatgtatctatataatccagcatctgctccatgtcttttttcgctgcttctttctcttcctctgaaagttccagctttgcaaggattcctacatactcgattgtttcatcggatattttatttgccaatttaatcatcctttctttctactctgtctttgctaatcctgacaattcccaaaatcagtatcataaatttctcagcttattgcgacctgtagcggtacatatcatagaaactgtcataattctggttttttactgagccggacggcgtcaggattaagtccccatcatccacttccagctccgttccctccgggaaaactgcatttctataagattctgatccatctgtatcataaaaccagagtccataattttcataattgagattttcattttccttatcataaaaatcaccaagataaatcttgtaatgaagctccgcccagtcaactcctgatgcctcggtcacatcataccatcctgccgggaaatctgttcccgccgtataagtgtttccagctttcaatgttacctgttccgtcagcggattttcttccagctgcatctgttccgtctgtgcattctcagaatgaaactggacaaccagtcctgtattaatcttcagatgacctcctgtatacaatctcacatcgtccagataatctcctgcatccgtatctgactcatcttcactaaaataagaatagtaataaatcgaattctcaggatcatcctgctgcatggagccttctcctgagacaagctccacttcataagtcccttccgggatctgtgctccgatttcatactccccatatcctaatacacagtcataagttgctcctgtttcagaaagttctctcgttgtattcatatatggatcatactcagactccacttcgctgccatcatcattccagtcataatctgaggaatggaaatcatccccaaatgaggaaatgaaatcaccaacggaacctgcaatgcttgtaaatgatacgattgccacgataattcccgcaagaattccactgattttccttgcttttttttgttcctcataagatcctgtatgagccttccttgccggattaaataccgtcggcccacctggctgcatctgccctgtctgtgggatttccatcctcggattttctttttgctgatattctgtctgcgttcttttccgtccgttatgactctcacagagatgtcccgcatccttctttttctcccggttttttgtctctccagtgtcattctgtcgtttctgggaatatgtcatttttttcttgcggtcaaaactgctctcattcagcctgtaattctttttgtctagctttgtgttatccagcccgcaggaactgcaacggccattaattaatttacctccgcaaagataacattcttttttcttaaacataaagatcctccctcgtttctactccttaagtttctgaccacaacatcctgtgggcagttctctttctcagttcagaccttcacatccaacagttttttcgttcaatccagaggattgacccgtttttgtattttcttcttatggttccagacgacttaagtctcttgggaataatgttgtttctcttacattgtcttcgttcatcatcttcattgtcagacgttccatacctattccaagacctccgtgtggtggcattccatgcttgaatgcacttaaatactgctccatgccttcatctgtcatacctcgcttctccatcttcgcaagaagttcatgataatcatgaatacgctgtccgccggttgtgatctccattcctctgaaaagcaggtcaaaactgagcgtgtaagtcggatcctccggatcatccattgcatagaatggacgtttctttgatggataatgagtaacgaatacaaaatctgcatcccattcttccttcgcataacggctgatcaatgtctcttcctctggttccaggtcaaatgggttcttgatctttctgtcatacttctcggataccagtcgtttgatctcgtcgaatcttactgccggaatattatctgtcttcggtacttcaatgttcagaatctgaagttctcttgcatactctttcttcaacagctccatcgtatactgaagaaatcccgtttccattgccatgatatcttcaaatccatcaatatatcccatctcgaaatcaaggcttgtgtactcattcagatgacgctttgtgttgtgtttctctgcacggaatactggcgctgtctcaaagactctgtcgaatactccgaccatcatctgcttatagaactgtgggctttgctgaaggatcgccggtctgtggaaatactccagacggaaaaggttcgcaccgccctctgcactcttggcaccgattttcggagtatggatctctgtaaatccttctttataaaggaaatcacggaaccctcttacgattccttcctgaattctgaacttcgcacgctctctgatatttctcagagaaatcggtctgtagtttaattttgcttccagagatgtgttcagcttccactttgcaatcggaagcggcattggctctgccggctcacttaagatcttcaattcaccaaggcgaatctcaatcccattcggagctttcgcagactctgcaagcacacctgttacctctactgtatctgcttccttcacatctttcaagtcaaatttggaaatattttcttcatatacacactgaacaagtccttctctttttctgagaataatgaatgcaattgttcccatatcacggatcgtatggatcgcaccatttactttcacttcggttccaattcttccctcttcgagaagttcactcagttccaatgtttccttcttttttacacctgttacaaattccataattcttctcctttcagattccagcatcccgggaagaagctttctaaataaaaaagccccgggatacatcagtatcccgggacggaaattacaatcataatatccgcggtaccacccgcattgaatctcagtcttcacatttcaaatcttatctctatccctgtgtaagccagattcccctctttgcatgtaacgtatgctccacgtgctgccctacttcacctgttcagacagccagctcccaagtgttcccttgattcgctccgctgtccggcgctctcagtcggtgacgccaacttcctgtcagtttctgtgaatcagagtcttgttctttgcctttttctagttcagcactttagtctactaaaacttgttttcaatattagcacagagttttttgattttcaagaggttttattcaaattgtcacacattttaacttttcatcaaaacaagatattttcaacctatcggttttgtgtactttcactaatttcttcctgtactgtgcttaatgcctgatccagctggttatctgcttttggattctcctcatcatactggtattcaactttcacatccggttcaacaccttttccattgatgcttcttccatttggagtataatactctgcaatcgtcactttcagacaggttccatctcccagatccatcaattgctgcacaacaccttttccatacgttgtcactccgacaatcttcgctgttccataatcctgtactgcaccgctgaagatttcagatgcgctggcactgtactggtttacaagaactgccattggtttcttaaattcatgagttccgtcacaagtgatttcgtctgtctttccattcttgtcctttgttgatacaattgtaccttccggaagaagcagacgcagcatatttgtaactgtatcaagacttccgcccgggttgtttctcaggtcgacaataagaccctgcattccctgcttttcaagatcgtccaacgcttctttaaactggtcataagttattgtgtcaaactcagacactctgatatagccaatctggttctccttcatctcatacgaaactgtcttcacttcgatcgtatctcgtgtggcagtcagttccagttcttctccgtctctgagaactgtaatctttacatctgttcccttttcccctttgatccaggacaccaccgtatcaagctgctcatcaccaacctcgtggtcatcgattttctccaggatatctcctgctttcagtcctgctttctctgccggagagccttcatagacatttacaattgtcgcatagcccgtatccgcatcttttgtcagcgttgcacccacacctgaaaatgttccgcttgttgattccctcagagcttttgtctcatcttcatcataataaacagtgtacttatctcccagtgcactcgtatatccggaataaattccttctgccagcttatctgtatcaatttcatcttcatacagataatatttatcaatcaaagcattcagcttattcagtttttttgatacctctttttctgtcactttaccggatacataactgccggctgtgttcgtaatgaccctgaatcccccaaggagaagcaggctgacaagaactgttgcaagaattccggtaacaatcccggctccatatccctttttctttttctgttccattgtctgtccctttcgctgttatttaaagaaaaggacaaagcagaatcttccactttgtccccctttattctttgaatcactttcatgtaaacatgaaaggaagattttgaatccctttgtcttacatataattattcggattcactggtgttccgttaagctccacctggaaatgtagatgtgctccggttgaatatcctgtagaaccaacatatccaatctgttgtccttttgctactctctgaccggcactcacacaaattgagctgtgatgcatatactttgtcaccaatccatttccatggcttataacaacccagtttcccgcactgttgctccagcctgccgtaatgactgttccggctgctgctgcatatgtaggtgttcctgtcggtgcggcataatcatttcctttatgtggtcttgaatcgaaagatcgaacctctccaaaataactggactggtacgtcattcccggacatggatgtgtaaaatatccacttccgctcaccacgtttccgctggaagccggtctggaactactgcttccgttactactgcttccgctattgttcttctttgccgcagcagcagccgccgccgctgcctgctcttcctgaagacgttttgctgcttctgctttcgccttgaggtctgcaagaatgttcgcattatctgtaatctgattctgaatctccgcaatctgtgcttccttactgctgatcagattctgtgcttccgtctgctgacttaccaagcttgtctgtaatgtattcagcttctcatactcatctttaagctttgcttccttttcttctacagctttcaccgtttcctgaaaagcaacaagcatatctctgtcataggaagaaagctttgatacatactccgctttattgagcagatcaccaatattgctgctggacatcagtatctcaaggaactgggtattaccaccctcatacatgaatttgattctcttcttcatgctgttatactgatcatcctcatcaaccttcgcctgtacaagctcttcctcagctgttgaaatttcagtttccttggcacttaattcttcctgcgtcttgttcatctggtcaatgatggaattaagtttcgcagcaagtgtatctttttcagcctgagctgcactcttctgtgattgcagctcatctgcttttttctgcgcttcatcaattgtcacagcaccggaagtaattgtcattgacagcatcattccgactgacagaaccagtgctgtcacctttctcatccgtcttttcataggtatctcctattacactcttaagtgcttacgaacagtgaagtaacttccgaggaatccaattccaattcccattgcaagcccgattggcaacaaatagatatatacatttccaaccggaaggaatgtaatgatattcttcagaatgctaaacttctccataatatatactacagccttgtcataaaggaaatataacagagcaagcggaataactgcaccgaataatccgatgatcagaccttcgatcacgaatggtgatcttactacaaagtccttcgctccgatatatttcatgattgcaatctcttcttttctgactgtaatacctgttgttaccgtattactgatcaggaagatcgatactccgagaagaattgcgataattgcaattgaaacatatgcaacaagcatattcacactggaaagtgtgttcgctacaacatctgacttattgacctgtctgactccgtccagactctgtgcaaatttaaccagatcctgctgcgtagctgaaagagacttactcttcgcgatcagatccttattatcaccttttaccgtcttcatgtagacttcatagttatccgaacctgccagcgggttatcatccttaaaaccttctgcaagttccgggttgtctccaaaatactctttctggaattctgcccatgcatcatctgatgacacatacttcacttctgaaacatcatcacgggactcaagctgttcgccaatctctttcttctgttcctctgttgcgtcatcattaaagaagacggtgatcgcaacaccttcttctgcacttttgataatatactggaagttaacaagtatcgagaaaaacaatccaaacaggaaaatacatgctgacatcgtcgctatggatgcgagtgaaaacatcttgtttctccagatattcttaacgccctgttttccaacgtatccaaatgtactaatcctcatttatatacccaccttttttctcatcactgacgattacgccctgcttcatagtaatgacgcgttcgttcatctcgtttacgatctcctggttatgtgtaacaacaagtactgttgttccacgctcattcgcctcttttaacagactcatgatctcccatgagtttgtcgggtcaaggtttcctgtcggctcgtccgccagcagaatggcaggttcatttacaattgctcttgcaatcgctactcgctgctgctctccacctgagagttcctttgggaatgacttatacttctgtgcaagtcctaccagtgacagagctgccggtaccttcttcttgatcacacgggtcggtgtctcagtcacacgcaaagcgaatgcaatattctcataaatattacgatccttcagaagacggaaatcctggaacacaactccaagtcctcttctgtatttagcaatgtttctgtgtttcatacggttcaaattctggccgttgacgataattgtaccctcggtcggattcaactctttcatgatcaatttgatcaatgtagacttacctgatccactgtcaccaacgatgaatacgaactctccgcgttcaatcttcacggaaacaccattcaaggctgcgtgacctttggaatactccttcgtcacattccttaattcaatcatatgttcctcctaaaacttatctatactcctacggttctagtactctaatgtctccatatacttcatatactttactaccattaaggcaatcttgaaagtaatggcatcctcaaacacacgcagatccagaccggtactcttctgaagcttatccagtctgtataccagtgtatttctgtggatatagagctgtctggatgtctctgatacattaaggctgttctcaaagaacttattgatcgttgtcaatgtctcttcatcaaagtcatccggagattttgcttcgaaaatctctctgataaacatcttacaaagtggcagcggcagctgataaatcagacgaccgattccaagtgttgtataagcaacgatatccttctcatcaaagaaaatcttacctacatcaagtgcaagcttcgcctctttgtatgacttggatacttccttgatatcacttacgatggttccgtatgcaatatgaatctgctcgtcgcttccctctgcctggagcgtatccagcatctctttcgccatcttctcaagttccttattgccgtccttatctgagagttctttcacaacaataatattcttctcatcaacagctgtgataaagtctcttgactttcctcccagaagatttctcacattatcaagtgcagcactgtctttctcgtgcgatgtttcaataataaagataacacgttttacttctgtgtcaatatgtaatttctttgcacgattgtaaatatcaaccaaaagaaggttgtctaaaagaagatttttgataaagttatctttgtcaaaacgctccttataagctacaagcagactctggatctgaaatgccgcaatcttaccgagcatatacacatcttctgtctcgccatctgcaagcaaaacatattccaaacgctgttcgtcaaagatcttaaagaactggcatccctggatcacctggctgtctgccggggattcaacaaaagaaagaaccgcttccccacaatcttttgccatatcaaatgttgctgcaagttccttgccttctgtgtcgagtacacagaaatcaacccttgatattccctttaatccttcaatagtgttttgaagtatctgatttgaaatcatccttttttcctccactctgtacgatgtattgctgattacagcaaactgtaagtagtaacacgcatgtgcatattccacaatttttttgtatgcattatttatccgtacacatacccttatattatattaaggcaaaacagcaaaaaaagaaagaggaaatccatcttttttatgcatttcttcgtcgaatctatgaaatattcacatttttatcttttagcattcttcacaaaggctaattctgcttctctactttatagcgaaatactttctttactaacattctctttatccggcttgtcatctttctgtcgtcaaagctgcgcatcagaactgatccacagccaatccagactcttgtgtcgatcaatgccaggttctgttcaataaaatcttcctgcgccggcgatggaaggactgataaaatacaatctgcctctgagccattgactgcattcactattccatggatcctgtctgcatctgtcaactctccgtcttccagatggatcacggcatctcctaccacacggattccctgattataccttgcaagagcttcctctgcttttaccagttcctcctgactggctgccagaagatagatcttatgatggttcttctgtaaatatttcaaaaacattcttaagaataatttattatccgtctcacgcaacaatcttgcatcatcagcttttgctgcctcaagaatctctacacttcccggaaggacaagatcctgcatggaaaccttttttttccactccggattctcatgttctttcatcagcgattccatcgatacaagctcaatggtattgacggaatcacctttcatgaattcgattgcctgcatcatcgcttcttttgccttaatacaggaaatctccacatcaaatattgaaattttttctgtcatttatgccaccaaagttatcactttccaaaaaactctgcgaattctaacgcaaaataatttctccccattctgtctattttaccaaatttatcctgatttgtcaaaagctgtgtcattcaaaattttacttttgtttatctttcatcatttttatccgcaatttttgtctgtttttttatctctcgtcttcttccggtgaccattccgccaattcgtcctgtctcttttgatgttaatgacttccacccatcctgcatcacgcgatctaaaaggcctaattcttctgctatctcatacttcagtttttcttccggttcaagttctgtaagattgattgtcttttccttttttcttcccatacttcttattgctgcatacagcatcctccttttcagaagtatttacaggaaaagaaattttattcgccacttacatgaatcgcaccaagaacctctccgatcggagccgatattacaagctctgcccggacagttctggctgtttctgatttattaatcacaacaaggtgttttccgtgaaaataatcaataaaaccggctgccggataaacaacaagggaagtacctccgatgatcagcatgtcggctgatgaaattgcttcgactgccccttggatcgtcttctggtcaagtccctcttcataaagtactacgtccggcttaatcatcccgccgcagctgcatctcggaattccttctgaattcttcacatattccgcatcatagaacttcccacatttcatacagtaatttctgtggatgcttccatgaagttcatagacttttctgcttcctgccgcctgatgcagtccatcaatattctgtgtcacaacagcctgcaattttccggcctgctccaattctgccagtttcagatgggcagcatttggcttcgcatccaaaatcatcatcttctctttataaaactcatagaatgcttccggatatttcataaaaaagctatgactgaccacctgttccggtgaatacttatatttctgatgataaattcctgttgcacttcgaaaatccggaatattactttctgttgatacaccggctcctccgaaaaacacgatccggttactctcatcaatcattgcctgcagctgctcaatctctttctcgtacatcttgcatactcctttctcaaaccacacttgccagattcctgtcaccttaaggcacactgccttctgcaccggcgaaatgtttacaaggactttcctaatatattaaaaagacaggtccgtccttcacctgcattcagctgtgtctgactccctgtcttttcttaagtaaacctgttcccggtacgtccggaaagcgatcttatatcttttatttatatcttacagatcgatttttcctgttgtatctccattaacaacataatatgctgctgactcttccggtttcagataaatcttaacatctttcatgtctccgactttattcttcaaatcctttgtccatacatctttgactttcttaagaatctctttctctgtatactctttaccagagaactgaaggaagaattctgtcttcagatcagctttctttgtagtcttagttgctgtcttcttagctgctgctttctttacagtctttacagccttttcagctgtatcttctgcttttgctgcaaccttcttagctgccttcttcactgtctctttcacttcttctgcctgaacttctggtgtatctaccagcactgctgcctttgtttcaagtttctttgttgtgtctttctttgtctcgattgctttcgcagctgctgtctctttcttctctgcctttactgttgctgtttcagcttttgttgttgaagatgtcttctttgttaccatacttgtttccctcctaaaatatacacccaagtatattggcactacctcattacaatgttattcttaacgcgaaataataacaagaacttttgtccgtaatgataaattattcacgatacagattattgtaactcatttttgacaaaacgtcaaattttccttgataattatcattttattcctctgaagaatatcccctgaaaaattctgaaagtccgtccaatgtcttcataagaaccggaatctctttttcatccagtctgttcagcacagcatttgtcatctccctgtgaaactcctcgtgatgatagtaagccttctcccctttttctgtcagccagatatacaccactcttcgatcctcttcaccgcgggcacgcattacatacttcttgtttaccagcccattcaccgctgtggtcagagaccctgccgtaatcttcatcttctttgccactacagacatcgttgtctttcctgaaacaccgattgcttctattatatgcatatcgttgtttgtgatgtctttaaactcctctgtaatgattgcctttttctccagctcccagatttcattaaataaatgtaccagaatgtcattgatggtattatacgcatccatcttttttcctcctcgtcttctactgttctctgatctcttcaaacagctcttctctattgaatcttccgggatcactttcattctggtctgctatcttaattcagacaataccatgttttctatctcttacattcgacgaaatctgtcgtatcttctatctgtcagttgtttttctgaaaggcttccatattgttcaaggaaatgttccatcttctcttccagttcacagagcacaggaaccatcgtatcttcccggtacacttcaggctcgcaaattatttcttcgatcaccttaagttccttaagatctgctgctgtcagacgcatcactcctgccgcctctgacgctctcttgctgtctttccacaaaatgcttgcaaacccttccggtgaaagtactgaatacactgcattctccatcatccacacttcatctgcaactgcaagtgcaagcgcaccgccgcttccaccttctccgattacaattgaaagaaccggcactttcaaagctgacatctcatacagattccgggcaattgcctcaccctgtccacgctcttctgcctccattccgcagaaagcccccggagtatctacaaaacagatgaccggacgctggaacttctctgcctgtttcatcagacgcagtgcttttctgtaaccttccggagacggcattgcaaaattccgttccagattctctttcgttgtctttcctttgcactgggcgatcacagtaactgcttttccatgaaaatacgcaattcctcctactactgccggatcatccttataatatctgtctccatgtaattctacaaaatctgtaaacaatctgtcaatataatccttaccgaccgggtgttctttttccctggatttcagaacacgctcccaggctgacacattttcttttactgcagatatgttttttctgttctcttttttcttttccggacattcttctttcttttcatctgtaaacgtatgcattttcagaatctgccccagtacttccttcatctcatccctggttacgatctgatcaacaaatccatgctcaagaaggaattcagctctctggaatccttccggcaatttctgtccgatcgtctgctcgatcacacgcggaccggcgaatccgatcagtgctcccggttctgcaagaatgatatctccaagcatagcaaagcttgctgtgacacctcccgtagttggatcagtcaataccggaatataaagaaggcctgcatcactgtggcgtttcagtgctgctgaagtctttgccatctgcatcagggaaatgattccctcctgcatacgtgcgcctccggaacaggtaaaaagaacaacaggaagcctctcctctgttgcacgctcgactgcacgggtaatcttttctcctaccgcatgtcccatactggccatcataaatcttccgtcacagaccccgatcacaaccggatatccacagattgttgcttttcctgtaacaaccgcttcatcaagtcctgtctttactcttaaagcttcgactttttctgtatacccccggaaatccaacggattctccggtctttccccttcatcgatctttgcatcccattcttcaaaagagcctgcgtctgtcacaagctcaattctcttatatgccggaatacgaaagtatccatgacatttaggacaaatatattttccgttgattacttcatctgtcaagattgccgcaccgcatttattacattttttcaagattccttccggtgcttccggctttcttctgtttcgtgaatgaatcgaagtgatcttctctccggtctttttaaacatattatgcagtctcattcatcattcctccgataaactccacatcaatatctccagatatgaattttttatgattcaaaatctcatactgataatcaatatttgtatccacaccttcaataataacttcgccaagtgcgcttctcattttacggatagcctcttctctgtcgtcagcatgtacgatcagttttgcaagcatggaatcataataaggcggaacttcatatcctgtgtaaatcgcactgtctacacgtacgccttcaccacccgggaaatgtacatctgtgatttttccaggagacgggcggaaattctttttcgggttctctgcattgatcctacattcgatcgcgtgacctgtgatcttgatgtctttctgctgaagttttagtctctgtccgtctgcaatcttaatctgctctttgatcagatcgattcctgtcacccactctgttaccggatgttctacctggattcttgtattcatttccataaagtaaaaggctccactcttttctaagagaaattcaatcgttccggcattcgtataatgagctgccttcgccgctttcacagccgcttctcccatcttctgtctcaattccggtgtcagtgcttctgacggagattcctcgatcatcttctgatgatttctctgaatggaacagtccctttctccaagatggaccacatttccatacttatctgcaagaatctgaaattctatatgacgcggatgttctacaaaatgttccagatacattgttccgtctccgaatgccatctgcgcttctttctgtgctgtttggaaacttgcctggaactcgtccggtgtctgtgcaacacgcattccttttcctccaccgccaagtgctgccttaacgatgattggataaccaatctcaccagcgatcttctcgccttcttctacggtatagacaggctccttgcttcccggaataaccggaacacctgcttccaccatcgtatttcttgcaacggatttatttccaagagcactgattacctttgaatccggtccgatatatgtgatcttgcactgttcacacagttctgcaaatttgctgttttcagaaaggaatccgaatcccggatggattgcatctgcgccggacacaagtgttgcactgatgatattctgcatattcagataactttctgcggatggagcaggacctatacagactgcttcatctgcgagctgggtatgcagcgcatctttatctgcctcagagtaaacagcaaccgtacggattcccatttctctgcaggcgcggatcacccggactgcaatctcccctctgttcgcaattaaaatcttctctatcatttcttctgctcctgatttttttattctccaaccataaatgtaagttctgctgtaacaacgacctttccgttaactgttgccacagcttctcctacgcctaccggtccttttcttttaataatctttgtctctaatttcaactgatctcccggaaataccattcctttgaagcgacatttttgtacaccaccgaagaatgcaatctttccctgattctccggtacacttaagattgccacagctcctgtctgagcaagtgcctcaagaatcagaactcccggcattactgctttctgtgggaaatgtccacgaaagaaatcctcatgataagaaacacctttgtatccaattgcatattctcccggaacataatcttcaatcttatcaatcaaaagaaatggatgtctgtgcggaatgatttcctgaatctgttctacatttaaactattcatatctgaattcctttcttaaacaattctaaaaatcggctggccgtattctaccggctctccgttctctacaagaacttcagcaactgtaccggcacattcactctcaatctcattcataagtttcatcgcttctatgattccgacaacctgtccggcttcgaccttgtcaccaaccttaacaaaactcggtgcatcctctgccggtgctgcgtagaaagttccaaccagaggtgaaacgattagttcaccttctgtttcttttatcacttcctgatgctcttcctgtgtgtgatccgcttcatttcctggattttgcagaatttctgctgtctgaagacccgctgtgacagttcctgtcaccggaactactcccggactctgtataatctccaccttctgctgttctttcttcagattcagctttgttccattttcttcatatttaaaatctgtaagctcagaagcagagactgcttcaatcagcttcaatatttcttccatcttcatcttcgcttctccttactcttcgaaacgttttacaagaagagacacattgtgcccaccaaacccaagagaattagaaattacacagttcacttctttctctaccggtgcgcctactgcataattcaatccacattccggatctacattctttgtaccaactgtctgatggatgaaattatccagaatactctttacgcagacaacaaattctactgctcctgctgctccaagaagatgaccgatcatagattttgttgaattgacaactacattttcggctgcatctcctaatgcataacagatcgcacgcgtctcaaagaggtcattgtgatgtgtacttgttccatgggcattgatataatccacttcttccggtgccacaccagcctctttcattgcaagtttcatcgccattccggctccttctccattttctgccggagatgtaatatgataagcatctcctgtagagccgtatccagcgagttctgcgtaaatcttcgcgcctctcgctttcgcgtgttcaagttcttccagaactacgattccggctccttctccgaggacaaatccatccctgtcctgatcaaacggacgggaagctgtcattggatcttcatttgtagacagtgctgtcaacgcagtaaatcctgcaattccggtcggacagatacagctctctgtaccccctgcaacacagacatccaagtcaccatactgaatcgcacggagtgcatctccgatactgttagatcctgatgcacatgctgtcacgacatctgtacattttcctttcagtccaagctggatggatacatttcctgctgccatattggagatcatcaacggaaccatcaatggatttacacgcgctggtccttttgtctggatcttgtcgtaattctgctctacacagctgagacttccgatacctgaaccgatgatcgttcccacacggtaaggatcttcctgctccatatcaagtcccgcatccgcaaatgcttcctttgctgctgcaaccgcatactgggagaacaattccattctctttgctgccttgaaatccattcgttcttttccaacgaaatctttcacttctgctgccagcttaaccttataatctgttgtatcgaattttgtgatcggaccaattccaactttacctgttttgattccgttccagaattcttctactgtatttccaatcggtgtcaccgcacccattccggttacaacaactcgtctcttcattttcctactccttctattcttacatcgccattccgccgtcgatatgcagcgtctggcctgtgatataacgtgcttcatcagaagcaagaaatgccgccgcattcgcaatatcttctgtctctccaaactttccaagagggatctgggctgttgctccttctttcaccttctctgaaagtacttctgtcatctctgtgttaataaatcccggagcgatcgcatttacggtaattcctctggaagccagttctcttgccgcactctttgtaagtccaaccacaccagcctttgatgcggaataattagcctgtcctgcatttccaagaactcctgatacagaagacaggttaataattcttccggatctctgacgcagcatctgtcttgagactgcacggatacaatgaaaagttcctttcagattcgtatcgatcacagcatcaaaatcctcttctgccatcttcataagcagtccgtctcttgtaattcccgcattgttcacaaggatatctattcttccgaattctttaatgattgtctgaaacatctcatcacaagatgctgcatctgccacatcacactgcatgatctgtgctgttccgcctgcagattcaatctctgttttcacttcctgcgcgcgctctttcgatccattataattgatcactactgctgcgccctcctgtgccagacgcagcgcgatcgctcttccgattcctctggaagcacctgtcactaccgcaactttccctgtcagtctgtctaacataattcatttaccaccttatctacgtcttcccaggttccgacgttatacactttcacctcacggtttatctttctcaagaaaccagccagtgttcttccaggcccgatctcgacaaatgtatctacaccgtccgcgatcagaagttccatactctgctgccagcgtacggaagatgccacctgacgcgcaagcagttcttttgtctttgtaatatcagttacatattctgctgtcacattcgtcacatatgggatctggagatcagaaaaatctacctgttccagttcttttccaagttcttctccggcctgctccagaagggaagaatggaacggtccactgacattaagcggaaggactctctttgctccggcttccttcagtgcatctgctgcctgttccacatcttccttccatcctgtaatcacaatctgtcccggacaattgtagttggcgatcattacaccacttcgatctgccagcacttcctcaatctttccggcatccagtccgagaaccgctgccatggctccctgaccacccggtactgcattctgcatcagaataccgcgttttcttactgttgtgattgcattttctgtgctcattcctcctgctgaagcaatcgcacaatattcacccaggcttaagcctgctgtgacatccggggcgagtccccgttctcttaataccttctccattgccatacagacagtcacaagtgctgcctgtgtatattctgtctgatccagaagatcattttcttcaaagcagagtgctttcatatccagtccaagcagttcacttgcacggtcgatcacctctgccgccgtcttactgttttcatagaaatcttttcccattccggctttctgtgctccctgtcccgggaaaataaatgcaatcttactcatagaatccttttcctccgatcagttcatctgtctgtgagaccagcttctggatcacttcctgacaggtaagcttctccttgatcatacctgcaatctgccctgccatcacgcttccgctctgaacatctccatcaacaacagctctcctgagtcctcctagtgtcagattttcaagttcttcgaatgttgctcctgcctgttctttctcaagatactctttcgtcattttattacgaagagcacgaaccggatgacctgtagatcttcctgtcacacgagaatcaatatcccttgctttcaaaatgcattctttataattctcatgcacctgtgcttcttctgtcacaacaaaacgtgttccgatctggacaccctctgctccgagcataaatgccgctgcaattcctcttccatctgcaattcctccggctgcgatcaccgggatttcgactgcatctacaacctgcggaacgagaaccatcgttgtattctcaccgatgtgtccgcctgcttctgttccttctgccaccagagcatctgctccacaacgctgcattctcttcgccatcgctacagaagcaactacagggatcactttgattccagcttccttccacatctttacatatttttccggagatcctgcacctgttgtgacaactgcgacaccttcttcgacagccacctttgcaacttcatctgcataaggactaatcatcataatattgattccaaacggcttatctgtcagcttctttgcctcacggatctgttctctgacccactcggccggtgcacttgctgttccgatcagtccaagtccaccggcatttgaaactgctgccgccagatgatattccgcaacccatgccataccgccctgaatgatcgggtactcaattccaagtaattctgttattctcgttctcataagaactcccttcttgatcacttctctatcaacggttctctcggatcggctgccgaaaaggaaccgaaatgcttcgttttctactagttctatacttttacttgtgtgattcgatatattttacaacgtcacccactgttgtgatctgctccagatcttcagatgggatctctacttcaaaagcttcctcaaatgccattaccatctcaaaaagatccagggaatctgctccaagatcctctttgaaagatgttgtctcacttaatgtgctttcctctacgtttaatgactctgctacgatttcttttactttttctaacatgattttgttttcctttcttgaatttaccattccatcaggcatcctgcccatgtaagtcctgccccgaatccggcaagtataattttctgacctcttttcagctttccatcccgattcatttcatttaaaaggattggaactgacgccgccgacgtattcgcatattcaccaagattcattgggaacttctcaatttctacgccaaccctctttgcagccgcttcaatgattcttctgtttgcctgatgcaaaacaaagtaatccacatcttctcttgaaacatctgcttttttcaacatttcttcgatgatttccggtacttttctcacagcgaacttaaaaactgcctgtccatccatccgaattaccggcgtttcttctgttccatattgtaaggtcaatgcctctcctttgtctcctgccgaatgtgccatggccgcatagacggcttccacactttcactttcttctccccggagaaccactgcacctgcaccgtctccgaataaaatgcaagttcctcggtctttccagtctacaattctgctcatcttctctgcaccgatcaccagtgcagtcttaacaagacccgaacggatataagactgcgccgtattcaacgcaagaataaatcccgaacaggctgcattcagatcgtatccccatgcatgaactgcaccgattgctttttgcactttacaggaagtattcggaaatactgtttctgaagaagacgtcgctacaaggatcaggtcaatctcttctgctttcagcccactgtctgcaagagcttcttctgctgcttttgcagccataaaagataccgtctcctgttttgcgagatgtcggctttgaattcctgtgcgttcccggatccattcatcacttgtgtcgaccagagaggacaattccacgttgtccattcgatgggacggtatgtacgatcctgtcccgcatattcttcctatcatatctcttctccaactctgtcaaaataattgtcactcttcacagtatgattctttccagatctgaaccataattgttttgacctttaaatactttgactctcaaagtatatcataaataaaatagatgtcaagataatttttagacagattttttctttttgtctattagttactgttcgcacgatgttactgttcacacgatgtgcgaccagcaatgcatattttatttgaatctgtcttttctgcgcagtataataaaataagcatctatagaaagggaatttgtcatgaaatacaagaatattgtttttgactttggaaatgtcatcggacgttttgatggaaaagcgatcctctcagaattctgtccatatgaagaagaactggattatttatccaaaatcgtttataaacgctgggcagaacttgacgccggcacacttgattatgatagttacataaatgaagtcatcgatcaggttccggaacatttgaaggactgcatccgccggtttgcaaaagaatggccacgctgcactactttacttccggataccattacatttatccatgaattaaaagagcgcaatataccaatctatctgctgtctaatgctccaacctattttgcagaatactatgaaggaagtgaacttctttctcagtttgacggaatcttattttccggaccgattagacttgcaaagccgtctcctgaaatctacagtcattttctcagaaaatttgatttaaaggcagaagaatgtttctttattgatgatcttgagccaaacatcaatgcagcaaaagaagtcggaatgggtggacttgtatttactggcgatatcaatgaagtaaaaaaagcaattggtttctgatccaattgctttttctattcgctcctgcttcaatcccttatcgattgaacgctttgaattctctctgtgcttcacgcttctgatctttctttgcgatcgtctcacgcttgtcatataatttcttacctttggcaagtccaatctcaatctttacaagacttccgctgaaataaacctgcagcggaacaactgtaattccctgttctttcatcttaccaaatattttcagtatctccttcttatgaagaagcagctttctcacacgaagcggatctttgttaaagatattccccttctcataaggactgatatgcataccatagatatacatctccccgtcttccacacggataaatgcttctttgatactacactttcccatacgaagagactttacttctgtgccatgcagcacaagtcctgcttcgtatttctcaagaataaaataatcatgatatgcttttttattattcgcaataagttttttctctgtctttgccatctgattccaacctctaactcatctattttaaccgcactcctgcaagtattatgccagctcgaaattaatcgttcggagcagcttatctgcatcacttacgcggacacgcaccttttcaccaagtttatatgtctttcctgtatgctctccaaccatttcatatgtctgctctataaaattataatgatcgtcccgcagatccacaacatgaacaagaccttccactgtattcggaagttctacatagattccccattttgtaacaccggaaatgacaccttcgtactcttctccaatatgcatgcgcatatactctgcttttttcatcttcacaacttcacgttctgtctcttctgccagtcgttctctgtcactacactgcttcgctacttccgggaggatcttgtcataatgttctatacgattctcattcagtcgtccgcgcagattctccttgataattctgtgaatctgaagatccggataacggcggatcggagaagtgaaatgtgtataatacttcgctgccagtccaaaatgtcctgtattatctgttgtatattttgcctggcacatggaacgtaatgtaagtctgctgatcagagcttcttccggggttccttccacctgactaagaagtttctgaatctcctttggctttacttcatcatgcacatgaatatgataaccgaaattattgataaatgtactcagtttctttatcttctcttcgtctggaacttcatgcgttctgtagagaaatggaacctctctccaaaaatattcttctgccactgtctcattagcaagaagcataaaatcttcgatgatcttcgttgcactgtttctctcataaggtttgatattaattggtttccccttctcatccaattcaatctttgtctctggaaaatcaaaatcaatcgaacctctcttgccgcgtcgttctctgagaatcgttgaaagttcctgcatcttctgaatcatcggaacaaaatccttatcttcttccagtgcttccggttcttctgccagcaccttagatacacctgtataactcatacgcttgtctacccggatcacagtctccgcgatctgatgatcgatcacctcgcctttcggagacactgtcataatacaggataatgccagacggtcttcccctgcattcagagaacagatgccattcgacaacacatgcggtagcatcggtatgacacggtcagcaagataaacactcgtcccacgcttcagtgcttctcgatccagagcacttttctcctgtacataattggtaacatccgcaatatgaactcccagctgataattctcatccttcattgtcagagaaaccgcatcatccagatccttcgcatcttcaccgtcgatcgtaaccatctgccagtcacgtaaatccaatcttcctgcacaatctgcttctgatacatcttttccaacacgaaccgcctgattcaataccttctccggaaattctgtaggaagatcataatcctttacaatagataaaatatctgctcccggatcattcacatgaccgatgatctcaacaatctttccttccggcttagcatgttcctgtccataagatgtcagttctaccacaaccttatgaccgtccatggcacccatctcttttccggccggaatataaatatctttcagatatctctgattatccggacgtacaaatccaaaactcttactcttctcatacaatccgacaatcttcttcacctgatgcgacacgattcttacgatttttccttcttttctcttacctccaggcgcacctgtaataatacattccacttcatctccctggaatgcaccgttcacattctctcccggaataaagatatcctcatcttcaccctctagcataacaaatccaaatccacggatattcgcctggaaggttcctgtgatacgcttcgtctgccctttactgtattttcctcttttagaaagtgtaatcttcccttcctcaacaagagcgtccaacacttcctgaagctctcttctctgttctttcgatacctgaagaactgtcgcaatctctttgactttcattgggatataaaaatcatcacaaataaagtcataaatcactttttttctcttttcaaatgtctgatccattctgtttcctttcatcgttactgttcacacgatgtgcgaccagcaacgcatctcgccattttaaatcgcctttggcgatggggcgagatgcattcaagtcaaaacatgcatcctccgtgtcaatcagcggagtgattgacacgggagtgaacagtaacctttcatcactacttaaagtaaaaaaagacattctatagtcttattatagaatgtcttatacttacttcatcatctgttattaattaaaaaccttaaggttcagtactactgcaagcaccaggaaaaggatagcaagaaactttgtagactttacaagtgcaccttccatagaacgtcccttgttctgtccccaataagtatccgccataccgccaattgttcccaatccggctgactttccttcctgcaaaagaataatcgctgataatgcgatacagtctataacaaagataatgtataaaacaatcttcaaaatgtccatcttctatgacctcctacacactaacgtaacagcacacttattaaaccataaaaatatagcttctaaaatcttctcatgccattacatgaatcttaattattctatcacaagtaaggttgatttgcaagtattaaaagattccaaatatcttctcacggaatgaaacatatagggaatcataatctgtatactgaatcttactgttcttaaacttttctccccatctgctgcagagatggtctgcgatcagtttcgcatcgtcatgctctgtcaaaagaattgccggaaatacataatagatcataaagaaattcagatctgtctgcacagcactgtctatttttccttttttcggagaaacatatgcatcataaaccttatctgtaaagtctactgcaagctctttggctgccgtctctttatcagaagcattctccgtatattctgtcatctcacggaaataatgtccatgattctctataaaagcctccatatttactttataagaagccttcttcaactttttcatcatcggcttcatatctgcaaatattttttctacatgatcaagcatattgttcctccattacgttaaaaaatgtgactagtctgttacaacacccttctgaagcattacattcgcataaagtgctgattcacctgttgcaatgattgcataagctgtcttagcttcatcatagaatgcaaaacgctcaatgtttccaacaacagcatcacctctgtcatcatatttacggataatctctttatatgtatcccagattggtgtctccacagtatctccaggcataacttccataagatttaccggatgctccacatagctgtccagagggaacacctgaagaatcgcatcaagaatctccggtactccgtgtccgtcgcaacggatcacaatcgcgtcttttcccattgattcagccgggaagtttccatcagagataaccagtctgtcactgtgtcccatctcagcaagtactttcaacagttctggtgataaaatttttggaattccttttaacatattatcttcctccttgatataataacatattattttaaaaaaggaaccgggaatttcccgattcctttcttttcactttaataattcagcttctctttacagatatgaattagtcatacaggtttggagagatatcctcatcatccatgtttgtagaatcataccagtaaccatctgttgtaacgtcttctacagactcaccatcacagatcttagcaagagtctcgatggagattttaccctgcatcagaggagactgtgtaacagcaccaagtaatgtaccatctttaacagcggctttgataactgatccagcatcgaatccagctgcaacgatcttatcatcatctgttccaagtttgttcaggttctggttagctgtgagaacaccctctgcagatacctggtttgatccgaacatagcgattgtatcgtctttgttcatgatgttagaagcctctgtagcacacagctcaactgttgtctgtgccggaactgcaacttcgagaactacgtcagcagatgcctgatcgccattgtcttttacctggtttacatagaagtcatttcctacaactgctactgtctttccatcagctttagcaagctcgatgaacttgttgatgaatcccataccacgctcagaaatgttagcagatgttgcatcctggttaacttcaccaacacgaacctgtccgtttccgattctgtctttgattgcttcataaatatgctctgctgcgattccaccagcctgctcgttgtctgttacaactgttgcgtatacagatccttctggagcgtccggaacacctgagtcgaaacatacaaccggaatcttcttgtcaagtgctgactgcagtgaatcaagaactgagttctggtcacaagctgcaagagcgattccatctggatttttgttgattgcgttgttcagcatgttaacctggtcagcgatatcggactcagcgttcggtcctgttgtgttagctgtaacaccgagctcatcacaagcctggttgattccctgtacagctgcctgccagtatgaagactggaagctctttacaacaacttcgaaatgatatcccttggaatctcctgatccttctgtcttagtgtcgccatctgctttcttagtgtcatctgccttggatccacatcctgcgagcattccaactaccatacatccaccaagtaaaactgctaaaactttctttttcataattatgtcctcctgacaaaataaatttgtgactgcttgtctgagttttcttccagttttcctctccctaatgccgggcctctctggcagagcctctttcgtgcatttcttaaatcgctctgcagaagtagtttgcccaggcttctttgtccgaaaactctttatacagtctgtttcgtttagcttctatagtaacagctttctttttcacgcttttttcagcatgtttccccactgctatctatccgcacacattaataatataacacattactaatggttttgcaattaattattgctttttcgtgatttttcacaaattctaaatttaagtggaaaaaattactcttttcctgcttttctcttaagaatatcaacaagtacggctgcgatcaggacaaatcctgtaatgatctgctgccagttagctgtcagtccgatgaatgggagaccagtcttcagaagacagataacgaatacaccaaacagtgttcctgtgatgcttcctacaccacctgtcatggatacaccaccgatgattgctccaccgatagcctcaagctcgaatccagcaccacttcctggctgaactgtagcgaagatagcggagtatgcgatagaagcaagtcctgcgaagaatccacagattacatatgctgcaatatgatagaatcttacattaactccggaaagtcttgttgcttctttgttacttccgattgcaagtgtataacgtccaattcttgtatgattcagtacaaatgtcataacaacaaccagaagaattacccataagaaaccgatcgggatattctgtccgccggactgaatcttgaagatacttctgaaccatccgcccggtgctgctgctgccggccatgagattccgaatccgcctacgataatggaaccaagtccacgagtaatcatacaagtacaaagtgttgccaggaatgccggcaggtccatgattgctaccagtacaccattcagaacaccaatcagcattccaagaataattgctgcaaggataccaacgattgtaggcattcctttgtgaacgatcagatatccaccaacgagtgaataacatacaagtccagtaccgattgacaggtcaacaccacctgtcatcagtggaaaggctactccaattgccatcaggacaatataataggagaagtccagaatgttaataaatgttgtatattttctgaagttagggctcattgcacagaagaagataaacagtgcaataacaacgagcaggacgatgaatttctgtcctcccattctgtcaataaatgacttattagagccggccttctttgttgtattatttgccattactttttccctccctactcaatctcacgtgtagccatgttcatgatattttcctgtgtagcttcggaaatatccagctcacctgtcttcttaccttcgcacataacaacgattctgtcactcatacgaaggatctctgtcatctcggaggaaatcataataatggcttttccttctgctgccagctgattcatcagcttgtaaatctcattcttagctccaacgtcgatacctcttgtaggctcatcgaagataaggatgtcacagtctcttgtcagccattttgcaataacgactttctgctggttaccacctgacaggttaactaccagctgatctgtaccaggagtctttgttgcaagctgctcaacatattcctgagcaatcttgttctctttcttcttatcgataaaaggaccgctcatgaatttttcaagtgttgccattgttgtattctcagcaactgatttctgtacaacaataccatatctctttctgtcctctgacagataaccgataccgcacttaacagcatcctgtgggctcttgattgtaaccttcttaccgttgatataaatatcaccgctgtcgatcgggtcagctccaaagagtgctctggctgtctctgtacgtccagctcccatcagtccggagaatccaaggatctcacctttgtgaagttcgaagcttacatcctgtaccatcttaccagcgttcaggtgttcaactttaagaactaccggtgctcccggaggtgtcatgttcttctccttcggatcttcgtaaataacacgtccaaccatcatgttgatgatgtcgtcttttgtactttcttttgtgatcaatgttccaacataagtaccatctctcatgactgtaacacggtctgtgatcactttaatctcatccatacggtgggagatataaacaattcccattccctgacttttcaggtcacggatgatcttgaacaactgctcgatctctgtctctgtcagagctgctgatggctcgtcaaagatgatgatctttgcatcatgtgaaatagcttttgcgatctcacacatctgctgcttacctactgtaagttttgacattgtctctctcggatcaatatcaacgttcattctgtcgaacagtttctgtgcttcttcgttcattttcttgtcatcgatcttgatgcccttcttgaactctcttccgatgaagatgttctgagcaactgtcagatgaccaagcatgttcagctcctggtgtacgatgataacaccattgtcctgtgcttcacgagcactatggaactcaacttctttaccttcatatgtaattgttcctgaatcttttgtataaatacctgtgagaactttcatcagagttgattttccggcaccattctctcccataagagcaagaacttcgccttttctgatctcaagatctacatggtcaagtgcgtgaacacctgggaaagatttatcaatccctttcatttccaatataacttcgcccattttattacccttgcctttctttcaatcaaacatttcgttcatcattcataaagctgatctcttaatatagaagagaaattagttctttctgcgtcttgcaagtacgtcactgaatactgcgacgataacaataacacctgtaatgataagctgataatcttttgtaaagccaagagccagaattccttcctgaagaagagcgatgataaatacaccaatgattgtaccgctgatggatgcaagtccacctgccatggatgtaccacccattacacatccggcgattgcttcgttgttgtactgatctccataaccaggctgtactgttgtatatgcagatacatagaagatagcgcctattccaacgagaactccacagataatgaatgcaagcatttcccatttcttaacatctacacctgaaagtctaacagcttctttgttactaccaaggcaaaggatgtaacgtccgattcttgtcttgttcaggataatcgcacagataactgcagctaccagaagaataacaagtccaaccgggaacccgttatatcttacaagatttctgaaccatccgttgtccggatctgctgcctgcggccagctgactgactgtgtctttgtgtaaactgacgcaagaccttttgcaatattcatacttgccattgaagtgatgaatgaaggtactgaccagtaagctaccaggtatccattaaagagcccaaaagcaaatcccacaaggatactgatcaggattgcaaccggcatggaaattccatgtgttgtcagtgtataacctgagataagtgcacaacagaacataaccggtccaatagagaagtcgatctctcctgtagcaattacaaatgtaacacccagtgataaaaatccaaggaaataagcataattgagtgcgctcatgattcggttcattcctgcgaagcttcctccggtcagtgcacagaagagtccgtacatcagaagaaggacacagcacaaaacaattctgttaaatcctaccttttttacaaaaggattttgtttaattttttccaattttcttcctcccatcttttactttgctggtgttgactggattgtcgattaactcttacgatacccccattcctcttaacctcagcgtaacggttcgctttcaaagctttaagatttttttgtttttcaaagtgtgttttcaattttcccgcacacctttaatacaagaataaattatagccttgttttcatatcttgtcaagatttcccaccgtttttagagcgaaacggttcgtttttgtttgttttcactatttttttatccattctcacaacaaaaaccacgcttttctgtgcattttgcttatgcactatccaaggtctcgtattgagtctccctctcttacagaggtactgaaactaatttttaccggcataccgttttgctctccgtttactcgctccaggagcatagctacagccttctcgcacatcgtttccattggctggacaatcagccataatttagggcgcagcacctgggtcatcggaagattatccactccgatgagcgagacatcttgcggacaggagagtcctgattcgttcaatgccataattccaccaagcatggtgttatagtttcctaagatcacaccggtcggacggtcttcaagctccaaaagttctttcattcctctgtacccatgttcaaaagaatgccctcccagcttacagtattcctttggaatctccagtcctgcctggttcatcgcatcagaatatcctttcacacgttcccttccggtatattcaatattagaggcaatcacagctattttcttgtgatggttctcaattaatttatttgttgcacgatagattgctgtccggttatcaacctcaacgcaatcatattcttcatcctggaatgatctgtcaaccagaacaaccggaacatttgcttttttcgcagcatgaagaaactttccatgcatacctacagcaaataccaatattccatctactttcctgctcagaagaaactgcagattttctttctgcagcttctcgtcattgcaggaatcacagatcaacattccatatccctttttatgaagttccattcccagataatgcagcatacttcctacaaaaagacactgtatatcataaaccagaactccaatcgtctttgtcttgtgggtaacaagccctcttgcgagctcgttcacttcataatgcagttcgttgattgcctcctcaatcaagatacgattttccggcaatacattaccgccattcaaatacttcgatatcgttgcaagggataatcctgtccttttcttgatatcgcgaatagtagcagccataatcttctcctcccaggccaatcagcgaaccgttatgcattttgcccaactcaactgctcattccattaaatcatacagcagattgacagtcaagtgtttctgaagaattcttttttattacgttgccagccataatgttactgttcacacgatgtgcgaccagcaacgccataattacactacaactggcaactcattcccccttagttcaaagcactatactaaaattttcttaaatctctcgtatgcttcgtcccatgcttctttgtcctgtggctcgtagatcttgatgtcctgagaacgtttgataatttctcttgcttcttcgataaatttgatatctccggaagccatgagctgcagtgcaatatttccaagaacagttgcctcgatcgggcctgcactaactctgcatccacatgcatttgctgtgaactggcaaagaagagcactctgtgttccaccgcctaccatgtagactgtcttataatctttacctgtacactctttaatctcttccatcgcatgacgatatttcattgcaagactctggttgatgcaacgaacaacttctccaactgtttccggaacaggctgtcctgtcttcttgcagaattcacggattcttgtcggaatatctccggcaggtgtgaattccggtgcatccggatcaataaagctctgaagtgccggagcttcttttgccataatctcaagctcgccaaatccgtactcatttccttcacggatccactgacgacggctttcctgaatacaccacaatccaatgatattcttaaggaaggaaatctttcttccatatccaccttcattcgtgatgttgtaatgctcagatttctcattgatgataggttctgcaagctctgttccaagcagtgaccatgttccacaactcaggaagataaaatcttcttctgatgttggtacagatacaagtgcgctctgcgtatcatgtcctgcaacagccataacatcaatcttatccagaccaagctctgtacagatttcatctgtaagagtgccgatctttgtacctgtaggtacaatttccgggaaaatatgtttcggaattcccagtgcttcgatcacttcatctgaccactcgccctttttcgcatcaagaagctgtgttgtagaagcgatagaatactcagcttttttctcccctgtaaggaaatagttgaaaaggtctggcatcaaaatcatcttgtcagctttctcaagaagctcttttcttgtctttacaagagaaaggagctggaatgctgtgttgagatccatgaactgatttcctgtgatctggtagaatttctctttatcgatcagtttgaaactttcttcgatcattccttctgtacgtgcatcacggtaatgtacagggttttcaagaagtcttccttcctcgtcgatcagtccaaaatcaactccccatgtgtcgataccgatactttcgatctttccacatttctttgctttgatcagaccctgtttgatttcaaaaaataatctcagtacatcccagtacattgatccattcaaaataaccggatcgttagaaaaacggtgaagttcttcaatgctgatcttgtcaccatcaaaagttccgcacattgctcttccgcctgaagcaccaaagtcaaatgctaatacttttttctccataatcttcctcttttcttaatactcttttagtcggtattaaaacgggggccctgcataggcagaccccccgcattctttgttctagctctgtatcgaaactgtatttacagtctttttacattttctgacaaaaggactccatcttatttgtaaagtggtccgtagttcttacaagctctgaagtcagcgccttctttatccattccaaatgcattccatgctgccggacggtagatatctttctccggtacgttgtgcatagatactggaatacgaagcattgaacacattgtgatcaggtcagctccgatgtgtccataggagatagcaccgtggttagctccccagttgttcattacatcataagctgtcttgaatgctccctctttaccatcacatcttggagtaaaccatgtacatggccatgtgtagtctgtacgtttccaaagcttatcagatacttcttccggaagttcaagtgtccatccttctgcaatctgaagaaccggtccaagtccttttacaaggttaagacggatcattgtagctggcatctgagcacgtgtctcgtaacggcttgagtatccgcctccacggaagtatccgttgtcagccatgcaccactctgtagcatccatgattgctttctggtcttcttctgtaacgttccaccattctttcataacgccgttaccattctcgtctttagcaacaccagatgcatcaagacaagctgctccagagttgatcaggtgaaggaatccaccgttctctttagcaacaccttcgaggtcatatcctgtagctttcttaactgcctctgggctccagtatgtacgaacatcagcgaagatctgagcacgtcctgtaagaagtttcatgaacatcattccaagtccgttgagaacgtcgttctctgtagcaaggatgtatggctcacgagctccgttccagtcgaaagatgtattcagaactgcctctgcgaagtctccgttcggatagaagtctgtccactgtctctgtccctggaatccagctgccagagcgttgtgtccgattgcttcctctgagaatttctcgtcaaggttcttatttccgttcataaggtctttgatgataactgccatcttaacaacgaactcgaactgctcctctttctcctctggagaagcctgaagctcttctgggttcttatcccaaccaatcttgcaagtctcttttgcccatttaagagctttctcgaactcagccttgtcatagatctcttctgacatacgacggatgatttccacctcgtcaacagactctacacgcattccaaggtaagactcgatgaaatcagaatcgatgatagatccaccgatacccattgtaacagatccaatctgaaggtaagatgttcctctcatggatgctgctgcaacagctgcacgtccgaatctaagaagtttctctttaacgtcttccggaattgttgtgtcgtcagcttcctgaacgtcatgtccgtaaattccgaatgccggaagtcccttctgtgcatgtgtagcaagtacagatgcaaggtatacagctcccggtctctctgttccgttgaatccccatacagctttgattgtctgtggatccatatccattgtctcagctccgtagcaccagcaaggtgtaactgtaactgtgatatctacgccttctcttctgaacttatcagcacaagcagcactctcacctacacgtccgattgttgtgtcagcgataacaactttaaccggctcaccatttgaatatcttaagttctcctcaaacagttttgctgcagattttgccatgttcattgtctgctcttcaagagatcctcttacgtcaagagctcctctacgtccatcgattgtcggtctgataccaattactggataagatcctactaatcttctttctgccataattacattcctccttaattgtttgccttgctctgcttatcttccttcgcagaaccgcttctttgagtatcattatagttctttcctttctttttgtcttgtggtatactagaataaaaatataaagatattcaccttttatacaacaaagtacaatttataaacatatatttccacatatgtgtttgtttttacactatttagatttttaaaggagattattgcatgaaatacatcaattacagagaagaacgtaatcacggaaccattgattttccaattgaattttatcatgttacgccgaatcatccacggtatgaaatgtcttatcactggcacatcgaatatgaacttattcgtgttttaaaagggaaattacttatgtcaattggtgaaaatgaattcactgcagtagccggcgaccttatttttataaaaggagggcttcttcatggcggaattcctaaggattgtgtctatgaatgccttgtttttaaccttgaatcgctcatggcagtaaatcatgccagcgaacgtctgctcaagaagatcggaagtgacactttaacaatcccatctcacattccttctccggttaaaaatctggagcgtatcacttccctgatgttcgaacatgtaaaaaaacgcacagagggacatgagcttatagtaatcggtactctttttgaatttctaggttatattttagagaataagatgtacgaaaacgtacggattatcagtcagaaagatagccgaaaaatagaacatttaaagaaagctcttgaagtgattgaaaaccattatgctgactgtatcacactggaagatctgtctcaggccgccggtatgaattcaaaatatttctgtcgctactttaaagatatgacccatagaactcctgttgactatctgaattactatagaatagaacaagcttgtttcaagctcgttacttcgaatgaatcaatcgcagacatcggacttagctgtggatttaacgatgtaagctactttatcaaaacatttaaaaaatataaaggaatgacaccgaagaaatatcttcgcgcaccactgtaatcaaaaattgcgaaacaggttaacatccattattttttcacgcaaaaggagatccccttacggagatctcctcttttcatatctcatttactcatgaaatatccttatttatcttctttttctgcagcgtatacagttaccagtttgttcaggtaatcatatctctccatagcttcctgctcattgagagcgaagagcttgtcagccttagccgggttagctctcttcagtgcgttgtaacgtacttcaccattcaggaagtcctggtatccttctgccttcggagccttgctgtcaagtgagaacttgtctccctctgcagccgggttgtaacggaagttattccagtatccacactctactgccagctgttcctctgtctgagctttgctcatacccttcttgataccatggttgatacatggagcataagcgatgatcagtgatggtcccggataagcctcagcctcagcgattgccttaactgtctggttgaagtcagcacccatagcgatctgagctacgtatacgtatccgtatgtcatagccattcctgcaaggtctttcttcttagtctcttttccgcctgctgcgaactgagctgtagcaccagtcttagtagccttagaagactgtccacctgtgttggagtaaacctctgtatcgaataccataatgttgatatctttcttgcttgcaagaacgtggtcaactccgccgtatccgatatcgtaagcccatccgtctcctccgaagatccactgggatttcttagcaaggaaatctttgttcttcagaacttctgctctctcttcgcaatcgcaatcgagtgcttcaagagctgcaacaagtttgtctgtagctgttccgtttgtagcgcctactgtatatgtctcaagatactcagctgctgcagccttaactgcctcatctgtagtcttctctgcgatcttctcaactttcgctttcagtctgtctctgattgtattctgtgcaagcagcataccgtatccgaactcagcgttgtcttcaaacagggagttgctccatgcaggtcctttaccttccggtgttactgtgtaaggtgtagacggtgaagagttaccccagatagaagaacatcctgttgcatttgcaatatacattctatcaccaaacagctgtgtgatcagcttagcgtatggtgtctcaccacatcctgcacaagctcctgagaactcaaggagtggctgtttgaactggcttcccttaactgttgtctctttgaatttagcaacaacttctggtttaaccggaatctctctaccaaagtcgaagaatgtctgctctcctgcattagcttccatgttagccattgtaagagccttctcaacttcgcctgtctctttattcttctttcctgggcagacattcacacaagatccacatcctgtacagtcgtaagcggatactgtcattgtgaacttcattcccggcattccgatcatatcaagtgtcttaagtccttctggagcctgagcaacttcttcctctgtcagagctaccggacggataactgcgtgcggacatacatatgcacagcggttacactggatacactgatttggattccaaaccggaatatctactgcgataccacgtttctcatatgcagatgttcctgacggtgtagatccatcaacataatcattgaatgcagatacagggagtgtatttccttcctgagcgttaacttttgcctggatattcttagcaaatgcaattgcatcatttcttccgccgtctgcgatatgtggtgtagcaagtccttcatcagctgcatctttccagctttccggaacttctacttctacgacctgttttgcaccagcatcgattgcatcgtagttcatctgaacgatcttgtcaccttttcttccgtaagtagccttagcagctgctttcataaggtcaatagcctcttcttccggaatgatagctgcaagtttgaagaatgcagactgaagaactgtattgatacgtccgccaagtccgatctctttaccaatcttgataccatcgattgtgtagaatttaattccgtggttagcgatataagctttcacctgtcccggaagatgttcctcaagtccttccatatcccatgggcagttcagaaggaatgttcctccatcaacaagttcctgaaccatgttgtatttgttaacataagacgggttatgacatgcaacaaagttagcctgatggatcaggtatgttgatttaattggcttcttaccaaaacgaaggtgagacattgtaacaccaccggacttcttagagtcataatcaaagtaagcctgtgcatacatgtctgtgttatcaccaatgatcttgatggagttcttgtttgctccaacagtaccatctgctccaagtccccagaacttacagttgattgttccttctggtgttgtaacaagtggcttaccagcatcaagtgaaaggtgtgtaacatcatcttcaataccgattgtgaatttagctttctcatcgttgtggtatacagcaacgatctgagcaggtgttgtatctttagaaccaagtccataacgtcctgtgtaaaccggaactgcatcgaacttagatcctttaagtgctgcaacaacatccaggtacagtggctcgccaagtgctcctggctcttttgttctgtcaagaacagaaatcttcttaactgtatccgggatagcgtcgatcagagcttctgcgctgaatggtctgtaaagacgaactttaacaactccgactttctctcctgcagctgtcaggtaatcgattgtctcctcgattgtgtcacaaacagatcccatagctacgatcacgtgctctgcatctgctgctccatagtagttgaacagtttgtagtctgttccgatcttctcattaaccttatccatgtacttctgaacgattcccggaagtgcatcatagaatgggttacaagcctctctagcctggaagaagatatccgggttctgagctgaacctctctggcatgggtggttcgggttaagtgcatgtgcgcggaactcgtcgattgcttccatgcttaccatgtctttcagatcttcataatcccatgtctcgattttctgaatctcgtgtgatgttctgaatccatcaaagaagttgatgaatggaatctttccttcaagtgctgcacaatgagcaaccggagtaaggtccattacttcctgtacgctggattcacagagcatagctgctcctgtctgacgacatgcataaacgtcagaatgatctccaaaaattgacagtgcgtggcttgcaagtgcacgggcagatacgttgaatactcccggaagctgctcaccagcaaccttatataagttaggaatcataagaaggagtccctgagaagcagtaaatgttgttgtaagagcacctgctgctaatgatccgtgaacagcacctgctgctccggcctcggactgcatctctgtaacctgtacagtctgtccgaaaatgttctcccttccttcagtagcccactcatcgatatgctccggcataacggatgaaggcgtaatcgggtagatagctgctacttctgtatatgcataagaaacgtgagctgctgcctgattaccgtccatggtcttcatttttcttgccatttttattcctccttaggtgttacataggttttacactgagttaagtataattaattcacatgtaattttattatatctccaaaagtcacaaaagtctagagttataaatatcctcttttgtatattttcgtgtgcagagcagtgttttgagaatagttatcagtgctgttattggggattattaactaaaacaggcagaaatagaaaaagccagaagagtactttctgttgaacattaactcttctgacttatgaatcactatacttttttcttattattctatctattcttaaacaaccggtcatcccacttcggtggttttttccctttgatctttgttggcaccggctcatactgatccacttttttcttctcgtttttttttctgcaatgtcttctgcaatagatcagcataattcctgtcataatcaccagacaacctgccagaagttctgacaccggaaatccgatccccggaagaacaagctgatccgttctaagcctctcgatccacacgcgtcctgccccataaccaaacaggtacataagaaagagctcaccttcatatttcttatgtttcctatacagaaacaatataataagcagtccggcacaccataatgattcatacaaaaatgtcggatgtacctggatataactgactccatcaattctctgcatattctcacgcataagttctgtgatatcttccggccttactgcatcaaccggaagcctcatcgcaaacagacaatccgtatattctccaaatgcttccctgttaaagaaattcccccaacgtccaagcatctgaccattcagaagtgccagtgcgattgtatccaaaatctgaaatggtgattttttcttaacagcagccatcacaaaaactgcgatcactgctccgatcacgccaccataaattgccagaccaccttctctgagattaaagatagacaaaagattatctttatataaatcccaggagaaaatcacataatagattcttgcgcctgcaattcctgcaattactccgacaattcccatatccagatagtcttccggattctgtcctgttctttttgcttccactgtggcaatcaaaaatccaatcaaaattgccgcaccgataatcatgccgtagtaagcaattgaaaatccaaagatgctgatgctttttcctacatgatccagataaatccctaaatttggaaagctgatattgtaatgcatattatgttatttcctttcatatccacagaaatcaggaacaaatccagttgttcctgattcctgtttttactgcttttccaattagaaaacaatgaatctaactggttttcaagcatattccctatatctgttaaacgttaaatctgaacagcatgatatctccgtcctgaacgacatagtcttttccttccagacgaactaatcctttttcttttgctgccgcatgagttccgcatgccatcagatcatcataacttactacttccgcacggataaatccacgttcaaagtctgtatgaatcttaccagctgcctgtggtgcctttgttcccttcttgattgtccatgcacgaacttccggctcccctgctgtcagataactgatcagtccaagaagatgatagcttgccttgatcagcttctcaagtccggattcttctaatccaaggtcttcaaggaacatggacttctcatcatcatctaactgagaaatttcttcttcaatttctgcacatactacgaacacttcgcagtcttcctcttttgcatactcacgaactgcctgaacccctgcattgttcacaccatcatcagcaagatcatcctcagatacatttgctgcaaagattacaggttttgctgtcagaaggttgtactcggcaagccatgcctgctcatcctcatcctctgtcacgaagctctttgccatcttattctcttccagatgtgctttcaaacggttctgaagatccagctctttcgccgccatcttatcatttctagaaagcttcactgtcttggagattcttctttcaagaacctcaagatctgagaaaatcagctcaagattgattgtctcaatgtcacgcagcggatcaatacttccgtctacatgcacaatattcgtattctcgaagcatcttacaacatgtacgattgcatcaacctcacggatattggcaaggaactggtttccaagtccttctcctttggatgctcccttcacaagtcctgcaatatcaacaaactcaattgctgctggaatgatcttctttgtatgatacatctctccaagcacatccagtctcttatccggaactgttacgacaccgacattcgggtcaattgtacagaatggataatttgcagattctgcaccggcctttgtcagtgagttaaacagtgtactttttcctacgttcggtaatcctacgattccaagtttcatctttctatattcctcctataaatccttagatttcaatcctaccaattcgcctgttcgcaatccggtttgtagtataaaacgatactgatttcattcttgtaaccttttaaatcttttcccatatttcagcgcctctcataagaagccctaatacagtaccttgtattataccatagcatcttatttttgtgaatattcattttcatctcttgtcacactgaaaataattgttgtaaaaaatatttttatgccggctcaaagaatgtccttacatatattcaaaagatgaaggtcataaatacaggctcttgatgaaattttttatctatcctgattagggggcaaaagacacgttaattaatatatgattttatttgtaccttgaaaatttaacacgaattgcgtaattcttgcagttcattgacaaaccggcagatatgaaatccatcacataccgcatgatgaacttgaactgctaaaggaagcacaattctcccatcttcctcgtaatatttccccaaggtgaaaatgggaattaaataactataccctttctatttacagctctaatgtgtcaattatattctttaatgcgtctgctgattcttttagcttcaatgcttcttctccactaagattaatcggtatatcagattcaattccgtctgcaccaacaatgacaggcatacttaatacaacatcatcaatctcatatactccatgtatcatgtgcgatacaggaagtattgatttttcgtcacgcataattacttcacagatacgttttactgacattgcaattccataatatgtcgcatgcttcttattaataatctcataggcactgtttttgacagcatctgcgatttccttcgtattttccttatggttataatgacctctcatctcacacatgtcactaagcggaacaccggatacattagcagatgaccatgccacaacttcactgtctccatgctctcctactataaatgcatgcacgcttcggctatccactgataaatgctgtccaagcttgcttctaagtcttgcactgtcaagaactgttcctgagccgataactctctcctccggaagtcctgacagtttgattgcaacctgtgtcagaatatccacaggatttgctacaaccagaaggattcctccaaaatctcttttggcaatttccggaataatggacttaaatattgccacattcttatttaccagatcaagtcttgtttctcctggcttttgccctgcacctgctgatataattacaatcgcagcatctgccacatcatcataatcaccagcatatattttcatagggctggcaaatggtattccatgactgatatccatagcctctccctctgccttattcttatccgcatctatcaaggcaatttcagtgaataatccactctgcataagcgcaaatacagatgctgagcctacgaatccgcagcctatcataactgccttttttgaatttgattttttcttattcatgcaatcatcccttccttttgttattctacaattctttcaaatatgtattcattacctgacgaaatttcgcctctgaatacataaccaagtctgttaaaacttctgataccatctggtttttctatatgattctctgccatatatcttaccatttcaccacgagccatcttagcatatgtgccttttgtgataagcttatcaccagacttttcgcaaaaagtaatagtaatatatctgtctgctggagtcagatatttttcaatacatttagagtattcctttgaagccagattaatgataattccgctgtcatccattacttccctgtaaagcatctcaccccagaactcatacaaatttttataatgcccgattgaagcctttgcctgcatttcgagtcgatatggtgtaataccatccatcggttttaataccccataaaacgctgacattattctcaaatgttcctgcacataatcaaaatgagcatcttcaaaaactacaggagccatatactgataggcaatgccctcgtaagctaaaacagcaggtgtaagttgtttatacagattcatagaattaattctctctatgttctgtgccgcaatattgtcattgcacttccacattttttgaagttcttcttcggttcttcctttcagccagctaagtatctcttctgttttttccatgaataccggacatgataatatccctatgctatcagtgtctgttttcatttttttagcgggtgataatataatcttcatcaacttaattcctgcagcattttttcaggatcatcagctgcttttactttatcattagcttttactattatcccatattcatcaataaggtatgttgttctgaccacacccatggatacttttccgtagtttttcttttccttccatacatcatatgattcaataaccttgcgctctgtatctgataaaagcgtaaatgccagtccatatttttcctcaaatttcttatgtgatgcaactgaatccttgcttacgccaagtacaaccgcacctttctcaacaaactgtgggtatctatccgaaaatccacaagcctgctttgtacatccaggtgtattatcccttggataaaaatataggattactttctttccaagatattcgcttaatttatgtaattctccattctgatccggtaattcaaaatccggtgcttttgttcctacttctaacatttttattctccaatctatgcatctttcatttctttcttctgacattcctggcagatgcccttaaaaaaaacgtcatggcttatatacttcattccatgtgtgtcttttattttcttctccagctctgatataacatccatatcaacatcaaatatctctccacactttacgcattccacatggtagtgattttcgagtgtaaagtcaaagcggtctgaaccatctggaacttccacttttctaaccttgccttcttctacaagaatgccaagatttctatatacagtccctcttccgatagatggatatttttcttttataaatgtatatatctggtctgctgttacatgacggtgcatttcatttactgcatcaagtaccatatctctttgaattgtatttctaatttttttcagcctccttaataggatttattcttaattaggattttatatcattctttttattctgtcaagcatatatttaattatgtgcacaattataaaaaaagatattcagatacgtaacactcatctgaataccttttttgtaactttattaaattgtcaccttctacagcatctctattagtctcaaatcgtgcaattacatcacatccacacttatctgcaagtatatctgctgctttgcagaaagtatttggtctgactggggcatacattattaaaatataattgcataacaaacagttctataatctgtcaggattatcatatatatttatatattcggctacagatctgtcaaatgtcttgatatgaccaaacagccagtcaataacattgatttttacctgttccataaacttttcatctggtccctcattttcatccagataatcatagagtaccttaacagtatgcctgaactcctcatgcttctttatatgttcctccaagcctgggtaacctacatctttctgcagtttttcttcttctttgaaatgaaattccgtatattcatcaagataatcaagcattttaattgcctttactcttgcatcttctgattcacatgcactcacaaactgctgaatacgatcaatcagttccttatgctgctcgtctattgtcttattgcctgttattaaattatcatcaaatgtaattactgtcataaaaccaccttacaatccacctcatataagttaccaaattgcataaatattctaattcttttctacttcttcacttttcttaactgcacctttgcccgaaatcatcttatacccagagagtacagaaaataacatacatcccattgctccaatcgcaaaaatcttatgttccttcatctttcctctgaagccggtataaaatgtagcaaccatacatgctaatgcacctactgcccaatatttatgagttttcacgatttcacctccaatctctttaattgtaacgcaaatataattgctgtacaacaccattatctatgcatttctttatatgttctgtcaatgatgtttcataaatttttcaacaagttcagctgatttcttaataattctctgcatgcacttcaaaatagctctgcggatgattacataccgggcatacctcaggtgcttttgttcctactacaatatgtccacagttacggcattcccataccttaacctcgctcttttcaaatacctgtgcagtttcaatatttttaagaagtgcacgatatctctcctcgtgatgcttctcaatctctcctacagctctgaattttgctgcaagttcatgaaaaccttcttcctcagctgttttagcaaagccttcatacatatctgtccactcataattctcaccttctgcagctgctactaaattttcttttgtatctccaattcctgctaattccttgaaccacatctttgcatgttctttttcattatctgcggtctttaaaaacaatgctgacatctgttcatagccttccttttttgctacagaagcaaaataggtatacttatttcttgcctgagactcccctgcaaatgcttcctgtaaatttttttctgtctgtgttcctgcgtatttgttcgctgtcatttcttttacctccgttttcttcactacttttttaaaatctgatgccgggtgcttacacaaaggacatataaaatcatccggtaattcttcgtctacatattcatatccacagattctgcaacgccatatcgtctgaccatcctccgtttgtccaactgcctccttttccgattgtaggatatgcttcttttataaattcatacacttcagttgctgtaacatgccttttcatcttatatacggcatttcgtacgagatctttctgaatagtatttcttctatttgtcatcgaatctccttattaggatttgttcttaataaggattatatatcattttaatagttctgtcaataaaatagtaatgattcttgttattatttttgctttaactataaaaatagatatcgctatttcaaacgctaccaatattccaattttaacaatattgcttcctacaagcatcgctgcagctagcgaatctattaaaatatgtgcgattacgcagggtaacacacctttggaatattcttttattgttccaaacataaatgtatttcctaatatcattagatagaatattagataattactagatccagctgtaatccaaggtaatctataaattggaatgtgccataaaaaccacacgattgatattaagaacatttttaatacatatgactttatattaaactttggttgcaaataccatctccaaccacattcttctaatccaccttgcaggattgtccatggcatatataccaatactgaaataattgttccgcccgtcaacgatatatttcccattataaatgaaacaccataatatacgcatacactaccaattgccaagatatatgagtagatggactctctctgcaaaaacatatctttgagcactgctttctgcccatctgattttgcaaaagcaatcgcaacaagcattggcgttaagttcattaaaataaacaagacagaggaaccaattgaatttccttcagaaaacaaaataagtaatatctgaccaataacaagagttactgcaagcgttattgcagaataggataatgattttttcatcataatctctccataaattcacattgtacttttcttttatatcgcatagacacagtatatcatatccactgtgcctatgcgatatcctactgcttctttctattccggtgtatatgaccagtgcatcattcggtttgtgatggtatcttcccacttaggcttttccctttcaggtcttcttacatatgaaatgtgtaaccataacattaataagcactaaagaaaacattacacctacagtactaaaaatcggccaatgaaatgtaaaatatgacaatttattttccatataaatctttactccaaccaaagtgaccattcctacagtaaacaacaatcctatcacacacataaaataataactgccttctccaaaaagcattaatttcatttgcttatcggtcatcccaatgcttttcataatatcaaattcttttctccgagtgtacatcccggtaaatacaacattacaataattagtcaatcccgcaatgaataatatgatacttacagcacctaagagaattcgatttcctctcatatatgtttctttttgctgcatcagatctgatttacagataacaaaaactcctgcttcgccggttccttcatccattgatacttctgtcatttcggatcgtttcttattttcctcggatatcagctcgttgatctgtgttttcacataaagttcttttcccggatcagcagtcaattccattgttaatctctttttctccgtcggtatcttttgaaagcctttctcactaataaaataatataagattccttctccatgccaggattgatgtatttctggaaaattatcactttgcctgtctaaataaccgcatagagtaaatgtttcggattccttttgaggaaattcgtctttctgttgtttctcttcactctctgaattgattagttcttttctacgaatcgcatcttctcttgagagcaaagttttaaagtataccggttcgccaattgcttcatctgcaagtttttgctgttccggggtcagcatatgatcatgtatgagcaacacgccatttccttcttccaaagatttcaaatcaatattgagttgattatcctgaacgtatttctcaagcgacaagatttgattgtcatttaaaatctgcacagtatcccaactgaatccttccaccatattgtcatctgtaagattcgaaagcccctcgtcatagggacgaatgcctttcttagatataaccgtatctacataggctccttcaatcagattggagttctcccaatcaataccatctatcttgtgtagttttttctctaactcttgagaaattggtgaaaattcatcataatcattgtcatacaacagttccacaccgtctccctgtgttaacaaaggatcaacatcgatttctctggttttatattcttccccacatccctggcttttcccgaattcgctaaactctcctgccagcaaaaaatcagggcgtttctcaagaagatgcttataatcgcatccatttgtaagtacattcattagaataaaagacagaactcctaaaaagatggaaatacttgtaatgataaatcgtgctttatgacgtgttatatttccccatgcaatataaaacatttctcctgtctcagagcgtttcaacaccagttttccaggatgttttacttttctgtcacccatatttccatcataagtggcactctcgatacaagacagatttgttatttttctaataacgccttctgatgctatccacaaaattccatttacaaatacaacagaaagaaaaagaatccatggtctgaaaaaggaaagtatcatatttcctcccatttcctgataaaaatgaaaccctaatatttccggtatcaataagaccaaaatcaatacagaaatcaaactccctaagacagaaccttttaacatgagtaaccgcatttgtttccggtatatttttgtgatctgtctttctgtggctccaatcgtgtggagtaatccgagattttgaatatcttcactcatggatatccaaagaacattacgcacaaggaaataaattccgcacaaaatacctatcgttcccaatatcaccatctcatatccacctgcgaatttagaaacggcagtatattgtgctgtatcagaaacgtatatcttctgatctgcactcttcatcggcaatgcctgatataatttttcttctgttttgcttctgcttaaatgattgctctgactgaaaagtaaagtatagggacccttttccaggtttaactcattaattttgtcatgtgaaatatatccgattgctaatttatttccagagtccgtataccatccacatagtttgaatttttctttcgaatgttcgaacagacctttgtatacatctaagtttatttccattccctgttctggttcagaaataccaagttttttcaatgctctctcagataatagaatttcatcctttttctgtgggtaatttccaatcacattggtatatgcaggcttcaaaaaattgttccagctttctgagtcagcccatactacatcacatatcgttttttcattattttctgaaacgtctgtagcttcacctacaaaaatgcttttcccaacctgttttatataatccagttgttttaattttgcatattgttcttctgttccgtcttctattctgcccgaagaagcagttccattttctcgggttaatcttatttcttctgcttgtatttttccacaggagattccgaagaccatggttatagcaacaataccgattactactgagcaaaataaaatcgtatttctcaccttttttgtgcccgcaaaatttttagccaggaatcggattatatcttcattgttatttggaatgttcttatgaaacatagtgatacctcctaacaatcgttacaatctcttgtatagattttcccatcggacatacgtattactctgtctgccatctgcgctacttcctcttgatgcgtcacgatcaatgtcgtctgatgaaatcttgcggcacaggattttagtaatcctacgacttccatacttgtaacagaatccagatttccggtcggttcatccgccaggacaatagccggtttcgtcaataatgcccgcgctatagaaactcgctgttgctgcccgccggacagcgttgatggaagacgttctaatttatcttttagtcctagtatttctacaatctcattgaaaaaatctacatcgatttccttgccatccagtctcattgggaggacaatattttcacgtatactaagagaaggtatcaaattatattgctgaaatacaaatccgatatttcttcttctgaatatcgttctttcttccttgttaagatcttttaaacttgtatttctgatccagacacctccaaaatccggagtatcaagacctcctaagatgttcataagtgttgtctttccgcatcctgacgtaccgacaactgctataaattcaccatcttccacagtcaacgacacaccatctaaagcacgcacttcatatgtatcggatgtataatatttttttagattcatggctttgattatatccatcttttctgtaaactcctttcgtaaatgctacctttaactcagccataatctattatacatggtacctcttacaaacttcttacaagctgcatatgaactgtctctaccggaagatttacctctataagcagccctggcttcatttgttttgctttcatcatccctttttgtaatagaacaatctctctggaaagatataaaccaattccgcatccttcctgccctcttgcctgctcaccacgataaaatctttgaaaaattttattttcttctccgtcttttatcccgattccataatctcttacttgaattttataaaacatttctgtctgtttcattgtgatattgatcgtgctgttgtttttactatatttgactgcattatcaaacacattataaagggcctcacacatccagtttttatcatgttcgcaaatgattttctctggcaattctacttgaaaaaagatttctttctcttctgcctttttctgtatttgccccaacgcatttagaatcgtttcaacaagattttctttttgagtgtgaacttgtatgattccctgctctaatcgggcagtttttataaagctctccaccaaaaagcataattgttcttcacttattcgcaagtctttcatgtattctgcattcaatacttcttgcgtttcattcaatgattcttgcagcaattctgtataattttttatatttgacagcggtgtccgtagttgatgcgcaatctcagaaatcaatttctgtatctcatatcgacttttttcggcctcttttcttcttccctctaacatttcctgtaaacggattaattgattggtagttttggaataaagcgtttccttcccgatatctgaaccatctaattcattgccgtttattaaggattccgtcaatttatatattttatttatttccttcgctcttaaatgattttccactaaatatacagtacttcctccgagtatgaaaccaatcaaaaacactgcaaaatttactacagccatgctattctcccattctatatcccattccaaatacattactaataacattcgatgaatcattcaatttctttttcaatctgctgatcataacgctaattgtgttaggatcaatgaattcactatcgattccccatatattttccattatcatctcttttgtaagaacctgattctgattcataataagatattctaaaagctgatactctttggctgtcaaaaatatttccgtctctccaacaaaaacctgttttctatcagaatataaaatgacttgtccgcacataaaagtattttcatttgactttctctttaaaacaacttctatacgttttagcaatacctttattgaaaatggtttaaccacataatcatctgctcctgtatcaaacgcttttaacatatctttttcatcatcttttgcagttaaaaaaatagctggaatttttccatttttttgaagctcctgatatagatttattccatccccatccggcaatccaatatctacgatcaacaaatctacagaactatctatatttttaattgcctcttttcttgaagcggcaagaatcgttgtataaccttgatttttcaaagatgtatctaatgcttttcttaacaatttatcatcttctataattcctattaccatacacacctcctgatttttctagaatgtaatacaaaaagtccattacaatatatataacacctctgtatattgtaacggactttttcaaacccagacttggtgcaagcaccatttccgataaaaacctcgaaagtttttattttatgtgcatatattccccaatttcattcacaaaatcaatatgttttctactaaattttcatctactattttatactactgggtacaggcttgaatctattgtttcatacttatcacatagcacctctagtgcttgaaaatctagtgctgatttcacatacccagccgttgtatcatttgatactttttgattgtacatcactttggcatttgaaataattttctcacgatgtttacgtataaaaatcatttcattgtgaacgagatccttatacgtactatctgattcattttccaaatcatataattcaagttctgatgtaggtaccggaatcatatggctaattctgagtgtgccctttaattctttttcaccctctttattttttactacaattcgtataattggcacaatgcttttcttaatgaccttatttgctcctgcaatctgataatccgaatctttgggcgatgacatcggaacataataatgatattgtccaatctgcaaaactacacccaaatatttcctagtatgtgttctagaattaattttgttagaatatacgtttggaaaatccttacgcaaccattccacataatcatccgaaacactatataatttgaattcttccatccgtatctccttttatttatttctccttatacgaaaacaagggagctaacgctccctttgagtttaaaattctccacttatatggcaggagctctcccgagtttaaaatcttccacttatatggcaggaactctcccgaagataggctctctatctaagaatagtatatgacaaattcataaaaatagcaactctttttatgtaattgttgcgttgttactgcattaaagcttcgataaaaacatccaagattagtgatccgcaaagtgggcaattcttcaaaaacttacatgaatgctcctacaaatcccttatttcaatctctcgtctccatcagaatcacttttccaaacacgaaagagatcttcacttcatcttcaccttctgcgaactcattactcacacacaagctgtctcctgatgagagcaaatgattctgcaatggatattttgcaccgctgatacagaaatcctcaaccggaaattgcatcggaaatactgaaaaatactttccgaaagcttcttctctgcgaattgcgattccatgatcaagcagacgaattctattatgactgtctaagatcatcgcttgagatcctgcttcaagtgcaatattcaggcactgaacattagcccagaaatgatccagacgatttcctgttcctccaagaatccagatttcttttcttctgagtccaagacacatacgaagtgcaatctccgtatcagacgcatcctttaccggattgaactcccggatcggtacacttgcttcttttctataataatcgatcacttcttccggcacactgtcaaaatctcccacaatgtaatccggcttgatcttatgttcataaagaaatgcgagtcctttatctactccgataataaattctgtctcttctgcctcaagaattggaaggacaaaatcttcttccagcattcccccgctcacaataactgttctcttacacattgccgtttaaaatctccataaactttgctgtattatctttgatatcacctttaaaaacgcctgaacctgagaccattacattcgctccggctgcaagtacttctgccacgtttttatgatagattccaccatctacttcaatatcagttgtaagtcctttctcattcagaaggtttctcaattcactgatacgctccagtgattccggaataaatgcctgtccgccgaatcccggttctacagacatgatcagaaacatctctgcctgatccagatatggaagcagtacatcaaccggtgtctttggtttaatagaaattcccactttcgctcctgctgcatggattttatcaattgttgcctgcagatcttcacatgcttcataatgaactgtaacgatatctgctcctgctttcacgaattcttccacataacggatcggttctgtcaccatgagatgaacatccagtgtctgtgttgttgctcccttgatcgatgcgagaacaggcattccaaaggaaatgcttggaacgaacattccgtccatcacatcaaaatgaatatactctgcgcctgcttcttctgttaatttcaactgctctcctaaaatcttgaaatctgctgagagaatagatggtgccaaaatatttttcataaacttaatacctctttctttcctttagttcacggtacatctccgtataatcttcatatctgatcttatggatcttcccttcttcaactgcctcttttacagcgcatccgggttcatgaatatggtcacagccattgaacttgcactgtccttcaaacggtgtgaattccggaaaataatattttaaatcttctttttcgaaatcattaacgtaaagagaactgaatcccggagtatccataatataagaatcttctccaatcacgatcagttcggaatgtcttgttgtatgttttccacggtcaatcttcttactgatacttcctgtctccatcttcacttcagactgcagaagattgatcagggatgattttccaacgccagaaggacctgcaatcgaagttgtctttccttttaaaagtgattttaactcactgatattttcttcttccttcgcacttgtgaagattaccggatatccgcatccggtataaacttctttcaattctgcaatttcaggatggcttgcaatatctgtcttattaaaacataatacgacaggtatctcttttcgttccatcatgacaagaaaacgatccaacagattataatgtggtttcggttttgtcaccgcaaatacaaccagtgcctgatcaatattggctactgccggacgaatcaactcattcttacgcggcaagatctttgtgatatttcctgtcatttctttttcatcaagtacctcgatcacagcatcatcaccgaccaacggcttgattccgtcttttcgaaaagcaccttttgctttacactcaaaaattccggattctactacattcacgtagtagaatccggcaatcccttttattatctttccctgcatatacttgctctctgttatcattgattcgtgttctcttctgtcccggaatcatttccggaatctccactatccggatctgatggctgagatcctttgctgaccatatactggacagttgttcctttttctacctgcgtaccactgctaacagactgatagaatacctgtccttctggatattcatcactataatcttcaccaatatactccggtgtaagtcctgcctgcttcaacagtttttccgctgtattctggtctttataggacagatccggtactgtaaccaccgtcatctttggtcctttgctcaccacatatccgattgttgtacctttagatacttcttttccggcatctgtgtcctgtgaaataataactccttcttctacagtatcactgtaatcttcagttgcatttccggacaaacctgcctgtgaaagtgctgcttcagcatccgacttggactttccggtaagtttaggaacttttgtcggctgatttcccttgcttattacaagagtaaccgttgttccttcttttacttctgcaccttcactcggactaacagaaacaacttctccctgctccacatcatcactgtaaacaggatcacctttcttcacaacaaggttcttcgcctgaagtgctttttctgcatcagcttctgccaaaccaacaacacttggaatcgttgtcatcttagcttcttcaccactgctgatcacaacattgactgttgtatgcttctttactttctttccatcagcaggatcctggctgataatctttccttttgcaacagtatcggaaggcgcagttgacttatggattccgagatcatatttgttcagttctttctgtgcttcctcatatgtcttgcctgtcacatccggtacttttaccatctctgaatctgtttgctgtgtagtcgttccttttccacctttaaatacgcccactgcatttcctacaaggaacatgatcaaaagtgcgatcacaacaccggcaacaaccataagaatcttcatgatcttcttcgtgtctttatttacttcattcttcttacggcgattccggtcatcataacggtctttgcgacggtcgtcgtagtcatcgtcatcatcatagcggcttctgcggcgatcatcgtagtcatcgtcatcatcataacggcttctgcggcggtcgtcgtagtcatcgtcatcatcataacggcttctacggcggtcatcgtagtcgtcctcataatcatcatcataatcgtcgtcataatcatcattataattctgacgattcttcatacgattcagttcatccggtgacataacaaccgtagtccgacctgtatcctgggatgttgccggcatacgttttgtcacaccatcaagaacaacaaaatccccttccggatctaccagtgaatgcttcagatcctgaagcagctcctcgcagctcatataacgcttattcggcagtttctgcgtacatttcataataatgcactccaggctgtatggaatatccggaacttcttctgcaggagacttgatcacttcattcaagtgtttcaaagcaaccgtcactgtcgaatctccgtcaaacggaacatgcccggtgatcatctcatacatcgtgatacctgctgaatagatatcactcttctcatctacaataccgcctctggcctgttccggagatgtgtaatgtacagatcccatcactgtcgttgttactgcctgtgttgccgttgatgtcgtagcccgcgcgattccgaaatcagtaaccttaacctttccatctttggaaataatgatgttctgcggcttaatatcccggtgaatgatatggcagttatgcgctgcctgaatacctgtcaccatctggatggaaatactgattgtctcttttgctgaaagctttcctttcttctcaatgtaatccttcagcgtaattccttctacaagctccatgaccatataataaagaccgcgatcctgccctacatcatagacattgactacgtttggatgcatcaatcctgctgctgcctgcgcttcacttaaaaacttcttaataaacgtctcatccgaacgatatgtgctcttcaacaccttgatcgcaacaaaacgattcagcttatgatccttgcctttatagacatctgccattccgccagaaccaatacgaccaagtatctcgtatcgttttcctaaaaatactccttctttaatcatacactcacctcatctgcaaatggctcaaacaataccactccgatgttatctgttcctccattctcttttgctgcttccaccagcatctcacctgcctcgacgatatcccggcttccctgcacaatatggaaaagttcttcatcttccaccatattacttaatccgtctgtacacatcagaatgatgtctccccgtttcagacggtgttcataaaagtccacatccacatcagcttttgcaccgatcgctcttgtgataatattcttatccggatgatgcttcgcttcttccggcttaattcctccaagccgtaccatctcttctacaagagaatgatccttacttagctgttggatcccctgattgatcagatacagacggctgtctcctacattggcaaaatacagcatctgttctttcacagtagcggcaacaaccgttgttcccatccccttcagatgttcgtcaccggatgcttctttgataatctcacgattggcagccttgattgctttcacaagaactcgttcgatatcctcgccctcgctcttcgcaatctctttgatcatcacttccacagtacacttggaagcataatctcctgcctgatggccacccataccatccgctaccacgaacaggttctggagaatacccagtggttttcccgtcgtaaagacgtagtcctgatttacctgtcgcaccattccaacatctgtaattgaaaatgtcttcataccttctattctccttcagtttctacgtaacggcgcctgagctgaccgcaggctccgtcaatatcagagcccatttcccttcttatagtaacatttattccgcttttttcaagtttatttttgaaattcaaagcacttttccggcttggacgaacaaaatcacgctcttttaccgggttgaccggtatcagattgatatgacagttcttatgctttaataaatgaatcagttcctgtgcatcttcatccgtatcattcacaccatgtacaagactgtactcaaagctcactctccggccggtttctttgaaatattcgtcacaggctgcgagtacttctgtgatatcatatttatttgcaaccggcatcaattttcttcgtttttcctgattggaaccgtgaagcgaaagtgcaagtgtaatctgtaaatgctctttcgccagttctttcatctttggaactattccacaggttgatacggtgacatttctctgactgatattcagtccatgctcatctgtaagtaaatgaataaacctcaggaaattatcgtaattatccatcggttctccggttcccatgatcaccacattcgaaaccctctcaccacttatcttctgaatctgatagatctgtccaagcatctcagacggagaaagatttctcaccagacctccgatcgttgatgcacagaatgcacatcccatcctgcaaccgacctgggaggaaatacagacagaatttccatgcttatatttcataagaacactttcgactacatttccatcatagagacggaacaggaacttgttcgtaccgtcaatctgggaaatctgtctctcaagcataacaaccgggagaatctcataattctcttccagtttttccctcaaagcctttgaaagattcgtcatctcatcaaaatgatctaccagcttcacatgcagccattcataaatctgttttgcacgaaatgctttttctccgatcgtcgccatctctttctgtaattcttcatatccataagcacggatatccttcttcatcttaaagttttcctcctgtatttcgttttttctgtgagttattcacattatttgtttgctttttctattttttcacatttcctgaaaatcatgctttttctttaatcttgcaataaagaatccgtcacaatcgtgaactcccgggaagaattggatacatcccttctcgatcacatcacttcgtaactccttgcaaagattttctgtaatatcatccagttcaaattgtgggtattctttcaagaaccagtgtacattgtccatgttttctcccggatttacggtacatgtgctgtacagcaatgtgccgccatccttgacgattgcctgtgcgcaagtcagaatctttctctgcaaatctgcaagttcttcaagatcttccggttgtacgcgatatttcagatctggttttttgccaagaacgccaagacctgaacatggaaggtctgcaatcacaagatccgctgtttccttatcatactcatcaaatacagaagcgtccttgcatacagcacaaatatttccaagtccggaacggtcgatattctgccaaatcagatctgtcttatattcagtcagatctcttgcttcaacccgtcctgtcttttcttctgttccattctctctcgccgccacttcatctgccagctgaagcttctctgccacatgaagtgattttcctcccggtgctgcacagacatcaattacatgatcgccggcttttggatctgccagttctccgacaaacatagaactgatatcctgtactgcaaagagtccttcctgaaaactttccagaccttccagataatcataatctgaaagataaaacgcataaggaagatacggatgtgcttctactttcgctccttctgcttccagtttttctttcaatacttccggtgtaacccggttcatacaacatcggatcgtaatcggcttctctttctgaaaatctgctgccatcttctctgtaatctcttccccatattctttcttccataaagaaagaatccattccgggacagaatatttcacagacaatctctgtacatcttcttttggatactcgatctcatccatcttgcggacaacatttctcagaactccattcacatatccccgcagacctgaaaatccttttcgaaccgcaagctttactgcctcactgcacaccgcatgatccggtacgctatccatatatttcagctgatagacactgctacgaagaagattacggatgaccggtttcatcttcttaacctttgtcttagaaatctgattcaaaatataatcaatttctatcatatgttccagagtaccttccacaactctggtaataaatgcacgctcacgtttctcaagatattgatattttgacagaacatcgccaagaatcttatgactatatgctccattctctgttatttccatcaaaatctcaagaacgacctcgcgttcattgatctgttttcccataaataatctcctattctccgcattttggaggttggctctgaacagttacagcattttttctttttgtcagtcattccttcttcgtccatttgtcaggatcaacaaacgtaaaagctgtaaaatcattgcggccgcacttgccacatatgtcattgctgctgcccgaagtaccttcttcactccaccaacttcgtcttcacggagcattcctgaatttccaagtaccttcaccgctcttctggaagcattgatttccaccggaagtgttataagatgaaatgccacagctaccataaagagcagaattccgatatcaataaggaagctggacatctggccattcataaacaggccgataatgatcaacggccaggaaatcatggaaccgaaatttacgaccggcacaagtgccccacggattgataaaggtgcatacccttcaaaatgctgtactgcatgaccacactcatgtgccgcaactccgattgctgctacagaagttgaattataaaccggatcagaaagtgccagtgtcttgtttctcggatcataatgatcggtcagatttcccgcgatatgagtcacctgcacatcatagattccatttcttctgagaatctgttctgccgcttctcgtcctgtcattcctgaataactgcggatcttcgaatattttgcaaatgttcctttcacctgggacgatgcgagcaggctgagaaccacaccgatcagtaccagtatataagtccagtcataataaaatccataatacatactaaaactccctcctgttatctatctgcagtccccctccagaagtcctcttattcctgtgtaaatttaactccgctttcaattgtgtatccccttaagaaagctcctgtatccattctctttttccccggaatctgaagttccagaactcgtaagacgccatcccctgtctgaacagtaaaggaatctttctctacactcaacactgttccaggctctgcttttaccgtgccatcagcctctgcttttgctctccagatcttcactacctttttgtcccaatgtgtgtaagcacttggccaggaattcaggccacgcaccagacgttcgatctgtactgcggatgtattccagtcaatatttccaagcttcttatcgagcattctggcatattctgtcgggctttctccctgcttctcgaaagttgccgtatgatcttcaatagctttcagagtctctacacaaagctttgctcctgcctctgccagtttgtcatgcaggctttctcctgtctcatcttctgtgatcggcacttcaaccttctggatcatgtcgcctgtatccagtccttcgttcatctgcattgttgtaacacctgtcacttcctcgccattgatgatagaccactggattggcgcggcaccacggtatttcggaagtagagatgcgtgtacattaatacatccgtatggtgtcatccccagaatttctttcggaatgatctgaccaaatgcaatgacaaccatcacatctgcattgtattttctcagttcttctacacattccggatcacggatcttctttggctgataaaccggaatcccatgtttcagcgcagcttctttcaccggagttggctgcatctctttaccacgtccctttggtttatctggctggctcactacgagacatacctcatgtcctgcttccaccagtgcctccagtgttcccacggagaagtccggtgttcccatgaaaattattctcatcaattattcctccacttcgtattccatatcttcctcgttgtaggccggtgaatcatgcagttctccttctactttctctacataaaggtgtcctcccaggtgatcgatctcatgacagaacgctcttgcaagaagttcttctccttctatctcaaactcttccatattttcattaagtgcacgtacttttacataattcggacgagttacgattccccattttcccggcacacttaagcaaccttcttcgcctgtctgctcaccggatgtctcaacaatctcaggattgatcaaaacgattggaccctctccgacatcaataactacaatctgtttgagaataccaacctgcggtgctgcaagacccacccccatcttctcatacatcgtatcaagcatatcttcaattaaaatctttgtacgaagtgtcatcttcgtcactggtttacactgtttttcaagaacatcatcgcccatctctcttacttctctgattgccattattctttcctctcttttctataaattcatcgggttaaaatcgaattggattctcattttctgaaaccctgagttaatttctatatattgttccatcctgtcttttaatacaactaaggttcggtattccggcgcttttacgtaaatcactctccggtaaatatctttgattttatccactcccggacttgccgggccgatcacgtcgagctgtgcctgacctttaatccgcaaaatgtattccttcagatacttgcacgctttctctaaaagtacctcatcttcacatgctgcaagtactgccatcaggttctccaccggcggatatcccatcagactgcggtaacggatttctttctcatagaatgcttcataatcctgcgctgctgaagcctcgatcgcatagtgctccggatcgtaagtctgaatcacgacctcacccggtctgtcacctcttccggcacggcctgctgcctgtgtcaaaagctgaaatgttcgctcaccggaacgataatcatctgtataaagtgacatatctgctgccaatgcaccgactaatgtgacctttggaaaatcatgtccctttacgatcatctgtgttcccacaagaatatccgcctcttcattcgcaaaggcagataaaatctgctcatgggaatcctttttcttcgttgtatccatatccatacggagaactcttgcctgtgggaatcttgctttcaccatgtcctcgatctgctgggttcctgcgcggaattctccgatataacgggaaccgcattccggacactccgtcaccttcggctgttcataaccacagtaatgacagaccatttttccacctttgtgtaccgacaaggatacattacagtgcgggcatttcactacatggccacattctctgcaggaaataaaaccagaatatcctctgcgattcaaaaacagcatgatctgctcttttgcattcagtctgtcttcaatcagttcctgcaacttctcactcaagatggaacggtttccattcttcagttcctttcgcatatcaactgtatgcacagtcgccatctgttgcatatgagagcgattcttcatctcgtaaagctgatactcaccaagccttgaccgatacattgcctccatcgacggagttgcacttccaagcacaacgctggcatcttctacttctgccctgtggactgctacttctcttgcatgataacgtggcacctgctcactcttgtaggttggttcatgctcttcgtcaataacgatcagccccaaatccggaaatggagtaaaaagcgcagagcgtggcccaatcatcacatcgacctcgcccttcttcgcacgcatcatctgatcgtaacgttctccggcagacagtcttgagttcatgatagaaactctgtcgccgaaacagcggtaaaaccgcatcactgtctgataggtcagtgcgatctccggaatcagaacgattgcctgttttccctggtcaacaaccgtgcggatcatctccatatagacttctgtctttccacttccggtcactccgtgaagcagataagttctccttgttccacacagatagtcttgctggaacccctggattacatgctgctgttcttccgtatagatgatctcctgttgtgatttctttgcctgtttcaccggattacggtatacctgctctgactctatcttcaacacgccctgctcttccaatgcccggatcacaggcagtgtcacatttaattttttcgtcaccagctcataatccagaattggggcttccttcaaagcttccaaaagccttgctcttgctttctgattctttttctgataaaaagccagcttctcctgactctcttcctcagtaagcagcaaacggagatgtttctttaccttcgcattctccttctgcttgattggcagcactgtcttaagcgcctggatcatcgttccgccatactgctctttcatccatgccgccagcgcgatcagtctcgcttcgattgccacactttttctggaaatgtctgtaatctccttcacctttgacagatcataattgcaagtctctgataatgaagtcacataacctttgatctgtcggtttccttttccaaaagggataattacttccatccccggatgcagctcgtctttcagtcgttccggtattcggtactgaaagatcttatccagtttttcatgttgtatatctacaataacatctgcaaacacaatcttatttctcttttaattcttccagaacttctttgatcagcacgcgctcatccatcggatgcttcacaccgcagatttcctgatagtcctcatgtccttttcctgccagtacaataacatcacccggttcgccgtgttcgattgcatatttgattgcctctttacgatcacagatttccacatattttccatctgtctttgcgattccggttttgatatcgttaataatatcctgtggttcttcaaatctcggattatctgatgtaatgattgtcaggtctgccagtcttccggatacctcacccatctcgaatcttctgtctttagaacggtttccgccgcatccaaacagacatacaagacgcttcggattatattccttcaatgttgtcagaagactttcaagactcatcgcattgtgcgcataatcgatcatcagtgtaaaatcatcagacaccttgatcatctcgatacgtccttttacctttgccttcttaagtgcatctttgatcatctcaaccggcacctggaaatggcggcagactgagattgcagtcagtgaattgtaaacactgaacttgcctggaacatcgatttccacatcaaagtccatcacgcctgcaacatggtatgcaacaccaagatatcctggtctggataccagttctacattctctgcgcgaagatctgcctccggtgaaaatccaaatgtctcaatcttacatgtagaccctttaaatacatctttgaaatacttgtcatccacattggcgattccgagcttacactgtttgaacaaaagccctttgcatctcttgtaatcatcaaaatccttatgctcattcggaccgatatgatctcttccaagatttgtgaaaataccgatctcaaatggaattcccgctgttctgtgaagcatcagtccctgtgatgaaacttccataacaacacagtcacagccagcttctaccatctctgcaaaatatttatggattgtataagactccggtgttgtattacatgacgggatcttcttgtctccgataattgcctcgattgtaccgatcaatccaaccttgtgtcctgtctcttcgagaatagacttgatcatgtaagttgttgttgtctttccttttgttcctgtaataccgatgactttcatcttatctgccggatatccaaagtaagccgctgacatcagagccagtgcataacgagtatcctctaccttaattacagtcacattttccggcacttcgacatctttctctacaacaacagctgccgcacctttcgccgcaacgtccgctgcatatttatgtccatcagatactgctccgctgatacacacgaaaacagatccttcttccacttttcttgaatcattgatcagtgttgttacttccgtagaatcacttccctgtactactgtgtaatccaggcgttctaataatttatctaatttcatgatctaaccctcctgttctgaactggtgtattgcatcattgactttcaggcaaataacgattgtcttaacctttatagaataacataatctcaccacatatgcaaaaaaacctacataatctttcgtcctgttttcgtctttcgaatcagccagacacatccaaatgacaataacacaagtcccacactcactaccggaatcatgatccaggccgaaaatgtctctggcttaatatttctcttataaacatcaagaaacatgatatggatcaaataaatcccaaaggaacatccacaaaatctgtcaatccacttctttgcctgttcggacggattgaattcgctctttttcaatcgtactaacataagaaatgccatcgctgctgccagtgcaagcagtggattaccatattccagcagacgttcataatgttctccatcctgcaaggttgccgcataagtcagcccataatttaatgccatgcatactacaaaaatacctgccggaatcattttctccttcatcacatgcttacggtatttatatatataatatccgataaatacataataagaatagattctgtcccccaccattgggacggaataatacatcttttcatcaaaaaatgtggaaatataattgaacaaaacagccgccgtaatcaccacaagaaatgcgcgttccatccgaaggttcatccctttacacataacctggaaaaaaggaagtaccagatagatcggaatcattgcatacagataccacagatgctgttctaccggcttatataataaatctttgatttgataaggatccttcatataaactgcattccagatcatatatattacactccacacaagcagaacaattagaaaacgaaagattctttttgcatgtttatgaagtgattcctgtcttccaagcagaagtgctcctgtaatcatgaaaaaacatggtacacttatccttgccagtagatttaatagcagtgaaaaattgtactccccaatcgtaatatcgccataggctctgcagtaatagtttgatacatggatcacaataacaaatataaaagaaatcattcgaatcaattccagattataatttttctctttcaatgcacgttcctctttctatctcttctaaattccatcttttttcttctttccgtccggtttataaaatgtgcctttcacaaccgcaccctttccataacgattgttcagctgttccaatgcggcatttaatttcttatgtttctcgtccggttcttttggaaattcaatatcaaaaattgtcagctgctccggtgcattctcttctactaactttgacgttcggattccgagcagacggacaggttctccactccagctttcacggaacaaattacaggctgtctcacataagataaccggatcattcgtcggcttttgaagctgcacctgatgcgacatatttctgaaatcataatagcgaacctccatgctcaccatcccggctttctttcctgccttcttcagcctgtttcccacgctctgcgcaagctcacgaaatacatctctcgcttcttcataagtcgttgcatcctctgacagagtcgttgaatttcctactccctttgcctcttccggttcatactgtaccttatcgtccccgattccatttgcaaaattccaaagcatccgtccatgactttttaaatgcaacgtaattacatttacatccgcatgagcaagatctccaattgtattgatttcaagtttcttgaaaacctccacacttgaacgccctgccataaagagttctccaatcggaagtggccacattttctgcggaacctcttccggaaataacgtatggatccgatccggtttctgaaaatccgaagccatcttcgctaacagtttattactggagattccaatattcaccgtgaatccaaaacgtctctttacctcttccttaatctccatcgccccgtccaccggtgttggatatcgcccgacaagctctgtaaaatccatataacattcatcgacactgacctgctcgatcttctttgtatatgtccgcaggaaatccatcagcatccggctcttttctcgatacatcttatgattcggcggtgctgtcacaagattcggacattttcgaaatgcatttactacaggttcacccgtctgaatcccataggatttagcaagtgatgattttgcaagaacgattccatgacgcgagctctgatctccgccaataatcgccggaatctcccgcagatccacttttgatccatttttcaattgttcaaccgccgtccagcttaaaaatgctgaattgacgtcgatgtggaaaataatgcgcgccatggtagcctcctttctagattctgcctgagttctttcttagtattaattcttgttgtatgcatatgcattctgtcagtttcttattttaacatagagtctgctcttgtatcaattacttcggtgaacgaaaaaagagctgtgaaaaactcaattttctaaaaatctccagaaaatttttatttttcacagccctgtatattatatcgttactatactgatattttgatgttgggggcaaaagcccccaactaggatacctacggattgttttgtgcaatgcactcccacaatcctacccactattcgcatatcgtgaagcttacgctccacttttatgctcatattggggcgggtcccaaggccattacaccacctttgtgcaagcaccggtggtttcagaccttttgaccctggtatcatattttatttcttcacacctgctgtcagtttaccgtccttcacatcgatcaagatcgtgtctccacgtcccacatctcctgcaaggatcagttttgcagctaatgtctctacattcttctgcaagtaacgtttcagtggtcttgcaccgtacatcggctcatatccaccttccacaacaaagtctttcgctgcatctgtcagctcgacactcagttcacgttcttccagacggcggttcacatcagcaaccagaaggtcaatgatggaacgtacatttgtctttgtcaatggtttgaacatgataatctcatccagacggttcaagaattccggtctgaaatgtgctttcagatcacccattaccatctcctgactctgttcatcgatcgaaccatcgtccttaattccttccagcagatagtttgcaccaatgttggaagtcatgatcaagattgtattcttgaagtcgactgtacgtccttgggaatctgtgattcgtccatcatccagtacctgcagcaatacgttgaagacatccggatgtgctttctcgatctcatcgaaaagtacaacagaataaggttttcttctgacagcttctgtcagctgtccaccttcatcgtatccaacatatcccggaggagctccgatcagtctggacacggaatatttctccatgtactcactcatatcgatacgaaccatgttgttctcatcatcaaacaggctctgggcaagtgcctttgcaagttctgtcttacctacacctgtaggtccaaggaacaggaaggaaccgatcggttttgttggatctttgatacctgctttggaacggatgattgcttcagttacaagctctacaccttcatcctgaccgatgacacgcttatgcaattcatctgcaaggtgaagtgtcttatttctctcactctcgttcagttttgcaaccggaatacctgtccatctggaaacgatctttgcgatctcatcgtctgtaacagattcatgcacaagtgaaagatcttttgcttttaccttcgcttcttcctcttccagctgtttctgcagctgtggaaggcgaccatactgaagctctgctgccttattcaaatcatactctctttgggctttctgaatctccttgttcacctgctcaatctgctcgcggatcttctgcacatgctctacggaattcttctcattctcccactgtactttcttacttgcatactgcgctttcagttctgccagttcttcctgcaaatgttccagacgctctttacttaagcggtcttcctctttcttaagtgcagactcttcaatctccatctgcatcacacgacggcgaagctcatcaagctctgtcggcatagaatcaagttctgttttgatcaatgcacacgcctcgtcaacaaggtcgattgctttatccggcaggaaacgatcagaaatatatctgttcgaaagtgtaactgccgcaacaagcgcactatctgtgatcttaactccatggaagacttcgtatctctctttcagtcctctcaggatagagattgcatcctcaacggttggctcatctaccagaactggctggaaacgacgctccaaagctgcatccttctcaatatactgacgatactcatccagtgttgttgcaccgatacaatgcagttcacctctggcaagcataggcttaagcatatttcctgcatccatcgcaccgtctgtcttaccggctccgacgatcgtatgaagttcatcgataaaaagaatgatctttccgtcactgttcttcacttcttccagaacggctttcagacgttcctcgaattcaccacgatactttgctcctgctaccagtgctcccatatccagcgaaaagattgtcttatctttcaagccttccggtacatctccgctgacgattcgctgtgcaagtccttctacaaccgcagttttacctacaccaggttcaccgatcagcaccgggttattctttgtcttacgggacaggatacgaatcacattacggatctcttcatcacgtccgatgaccggatccagtttctggtctcttgctttttcaacaagatcctgaccgtatttattcaatgtatcataagttgcttccggattgtcagaagttactctctgatttccccttactgttgacagcgcatggaggaagccctctctgctgatgccatattcacggaaaatctgcttcaactcacggcttgcatacttcagcattgcaagaaacagatgctcaacagagacatactcatctcccatctgctttgcttcatcctctgcatggatcagcacattattcaagtcctgaccgacataagcctgacctccctgtaccttcggtctcttgccgattgcctgctcgatactgttaataaagagctggccctgaatgttcatcttctcaaataattttaaaatcagactgtcatcctgtgtcagcagcgcatacagcaaatgttcctgcgccagttcctgattcccgttatccgcagcaatcttctcacagttctgaactgcctgtaatgaattctgtgtaaatttattgatattcatggtctttccctcctttgaaccacaaattttcttttcctgtgttctattaggaatatagcacggattgttagcactgtaaatagttgagtgctaattcttttctaaaaattttgtaaagtctttattttttctgtttgccagtgttataatctataattgtttcataaaaatacggttgctgacgcccatagtgcgacagtaacaaaagacttaagagaggaaactatcatgaattttattcaaaaaaatttcaaaggaattctggtctgctttctgattgcgattccatcctggctgattggaaaatcattcccggtaatcggcggacctgtcattgcgattctcgccggaatgatgatcacctgcttttggactgaaaaaggaacagccgaatcaggaattaaatggacatctaaaattattttacagactgctgttgttctgcttggattcggtatgaatctcggagttatcttacagacaggaaagcagtctcttcctattatcgtcagtacaatttctacctctttgatcattgcatggctgctccgcaaggtgctgaatgttccttccaacacatctatccttgttggtgtcggttcttccatctgcggtggttctgcgattgctgctacagcgcctgtcattgacgccgatgacacagaagtcgcacaggcgatttctgttatctttttcttcaatattatcgctgctgtacttttcccggtgcttggaaatgcactcggcttcgacacaacaagcggaaatgctttcggtgtctttgccggaactgcgatcaatgatacttcatccgtaactgctgccgcctctacctgggacagcatgtggaatcttggaagtgagacacttaatactgctgtcacagttaaactgacacgtacgcttgcaatcattccgatcacacttgtgctctcactaattcgtgcgaaatcagccgcaaaagacggaaaatcatccggtaagttcagcttaaaaagagcttttccaatgttcatcctgtactttatcattgcggccgtcattacaactgtatgcatgagccttggggtaagtgcggatgtatttgctccgctgaaagaactgtctaagttcttcattatcatggctatggctgcgatcggtctgaacagcaatgttgtgaagcttgtcaaatctggtggaaagccaatccttctcggtgcttcctgctgggttggaattacagtagtcagccttgcaatgcagcatgtaatgcatatatggtaaaatattgatttttccattacatgagatgtataatcttctttgactttaaatctatttaggagaaaacagatatgaatagcaaatcaaattctcaggcgatggagactgaaaagattccgcgccttctggcacagcttgcaattcctgcggttgtcgcccagatcatcaatcttctatataacattgtagatcgaatctatatcggacacatttccggtgttggagccgcagcattaaccggcgttggattatttacaccgatccttatgctgatcaacgcttttgctatgcttgcaggttccggtggtgctccgcgtgctgcgatatctatgggaaagaaagataataaaacagctgaaaaaatccttggaaactgttttgcacttctcatccttatggctgtcatacttactgtagttttctttacatttgcaccacagctgttgacactttttggagccagcgagaagacactgccgtacggagtagcatacgcaagaatctatatccttggaagtatctttgtcttaatcgtgatgggaatgaatccatttattacaacacagggatttgccaagatcagtatgatgactactgtgatcggagctgtgatcaatatcattcttgatccgatttttatcttcgtattcaatcttggtgtaagaggtgccgcacttgccactgttttaagtcaggctgtcggtgcgatttggattcttcgtttcttatccggaaagaagacgatccttcatcttagaaaagaaaatttcagattacaaaaggatgttatcttaccatgccttgcacttggtatttccacttttgtcatgctttctacagaaagtattctctccatcagctttacttccagtctgtcaagatatggtggagaccttgctgtcggagccatgacgatcattacaagtgtcagccagcttgccacgctgccactgcagggaatctgccagggcggtcagccgatcatgagttataacttcggtgccggcaataaagagcgagtaaaaaaagccttctttacacaatttaaggtttgtacgattttcaccagctgtttctggctgatcatgctgctgtttcctaagctgtttgcaggaatcttttccaacaatacggatctgatcacttataccgcatgggcgctgagaatctatatggcaggtattttctccctcggattccaggtttcatgtcagcaaagtttcatggcattgggacaggcaaaggtcagtctgctgctcgcctgcttaagaaaactgatcttgctgattccgctgatctttatcctgccactctttattcaggataaggtttttgcagtctttcttgcagaaccgatcagtgatattgttgcagccacaattacaacaatcacattcatgagccgctttaatggaattctgaataaaggcagtaaaatgaaaaccgcagaataaattttatctaactattcttttgactccatttcatgatataattaatttatctgaaatttatgaaacggagccgttaatatatgaaaaagctaaaacttttatggatgatcctaaaacgcacgaaagcaacccagattctttccggttatatcgtatttctctttgtatccgcagccatcattcaactggtagagcctgacatcaaccactatggagatgccctctggtattgctatgcggtactttctaccgccgggttcggcgatattgttgccataactttcattggcaaactggtttctgtacttgtcacaatctacacgatcttcgttgttgcaatcgttaccggtgttgttgtcaattattacggacagattgtagagatgcagcgtcgtgaaacggcaatgatgttcctggataaattagaacgtctcccggaactttccaaagaagaactggaagacatctcaaaaagggtaaaaaaattccgctgagttttcactcaacggaatttttgttttccacttttctcttatcaaataaggataggcatttgctgcctgctgccgcagccacaaaaatccatacgaacaatttcaccggatagcatagaaacagaagcattgtaacggctaacggctttttcatcgttccacctagaagcgccgctgtaacaattgcagatgcgaaaacaagatgactctctgcatttccgcagatcagcattcccacgccatatcccatgcatacacctgcgaagataaccgggaagaaatgtcctcccttcaaaccgaactgtatacaaatatttgtgagaagcactttcaaaaatgcaactccgatcagtgctaacggaaggtattgactatactctttcatcaacactcccatctgttcttctcccgaaaacataactgccgggattaacattccacagattccaagacaaattcctgcgaaaacttctcgaagaactgccggtacctttttcgcagttttcttcgttatctgatgtgtcttttcataaaaaacagctaacacgcatcctgcaataatatagagaagtattaatgcatagtccatctttccgatctcaactgcctcggagcttggaaaaccggaaagtcctgaaccgaatactgcggaaagtcctgcataaatacctgttgcagcagcaattgcgattccataaataaatatctttgatgaaattcctgccggaacaacagtttgttctgacttattctcttctaaagtgttctcttccacttcaaacaatccaaatagcggagcatggaataaaacacttaaggatgctgctaccccgatctgggagtattccttcgcatgctgtctggcaaacttcagattatctcctgcccagtaacacattccgacgataattccggtaagcccggcttccggacctacactgcttccgatcaaaagcggcagcactgctgcgatcatcatgacaagcatatttttataatcataatgcttctccgttttcacttttgccataacagtttccatttcttccggataatctccgtacaccttccggaagataccgataagaaatgcaccgatcacacagaccactatcgtatagtatggtaataaaaaatgttctggaatccattcccagataagattcatcccgactgacatgatctttaaaagtgcccagaccaatccaccggcaactgcaccgataattgcacagaacagccagagctctaactggttttttatctttatatttctaatttctttttgactgttcatcgatctgtcctttacgttttctatttctcagatacttctgcatccgtatctctcacctgtggaattaatgaagctgccaatttcccttttccgcgatgtttcaggtataaaattccaattgcagaaaatacaacggctccgacaaaattcaccataagatctttcattgtatctacgattccaatgtctaaatatccgcccagattccacgtctcaccgttgatcacaacagactgaacatctacatggattgggatatttgctcctgtcggattcagcttcactgaattaattgccggaacgatccagtctttctgcatatccaatccgaaaaaccaatccatactgaattcaaagaactcccacaaaacaccaactgtcattgaaaaacaaaatgcaaaaaatgccacaaagtatggggacatcttaattgaaaatcgatcacttctgttgaataaatcaatcagcgcaaacccgattgccgccatcaggaatccattcgttgtatgcaaaatagtatcccataccggaatctttacataaaatgcattgatctctccaagtatctctgctgaaaagataaaaatcagaataaccgtttccagaccaaccggaattgtcactccaagtttcttgtcgataaactgtggcaccataaacaaaatcaatgttagaattccaagaaacatattgtgatagtttcctaaaaagaattgtctgatgatggagacaataaccaacattgtcagtaccatctggacccttgttctatttcttgcttttttacttaattcactcatttctcactctccttttctctcaacacattgcggtcagaaacactttttattacatgtttaagatataccgcatctgttttcataatatactaattttatctttttttcaacaaaaggtgtcaggccgaagtttaaaataacagcttccacatatgcctgacacctttctatctatcgtttatagattcactttaattttacttctgttttcttcttctaataacataaatcattccaccgatcactgcaattgatcctgcaatcatcagaatccagatgtaactgatgctgtctcctgtctttgctgttttcacctgttttcctgaagttcctgttggtttctttcctgcagtacctgtcgatgtttcctttgaatcggttggattctttgtttcttctttcttcacaatctggtaatctatctgatagtctgtatcatctccgtgaagcacataattatcactctgttcgccgatcattccgacaatggtggctgtatatgttccggtcttgatttcatttccaccttctacaaccggcttgcagtcatcttcgaacaatacccctgtaaatactgcagacacatttgcttctttccctgtataaatcacagttccgtccgtattccatgcaacgcccagaggttttggctgtacctgcagtgttcctggtttaaacagtactgtgtaattcgcattatctgctgtcagcggagttttttctgtaatatcataaagaccgaccgtacagttttctttttctgcatttcctgctgtcaatgtaacatttattttcaaatcctctaactgatcatcccctgccagacttccatcactgattgaccaggtatactctgtgatcgtctgtccatattctttctccgtacggtccggtctgatcgtaatgcttctcggttttactgttacagaaatatttgacgtaactgtcttgtagttcggattagccggtgtgaagatcatctcctgttcactttgatcctctgctactgtaagcattgtcgtatcgtctgcaaaacggaatacaccttctcccgactgaccggaaagtgttgctttctttaagctgtctccataaatcacttctgctgccgggaaagtcacttctggatctgcctgcaaaatctcatattcccatacatgcacgcggtttgtgccggaaaagatatagttttcattggtcagacctattgcaagcgccttataatttccaacttctgtatgatctgcattgagcagttttttaatcgcacaactatccttttctaaaaggctgtctgctttcacgtttgcctctattccacatgcatttcctgtatatgtatactgtgctgccgcattccattctatctctgcttcctttggtgatacattaaggaatgccggaagaactacaacatcataattcgtatttgtcgcattgtctttcaggatgacatatcttcctgcgtttccatatgcgccaagaatgtcatctccatcttcatctgttatgcttcctgtcagaacatcttccggttcgatagttgttgctttcaatgtcagtccgagactttcaacagtatctcctggaagaagtttcgccttttctgaatcactgatcgtaaatgtaagatctgcgctggtcaactcatctccatatgtctttgttttcttttctgcacggacaatgattctctgtgcactactgactgctccattttcgaatgtagtattttctgctgtgctgcttttggaacctgttgtttccattgtgttcactggattgatatcaagatcgtattctttcaaatgaatccagtttaccttgaatccgcctactgtttccggacaatcaatcttatagcttcctgcatcgattgtctcatttaatgactgtcctgtctcctggattctcatttcatccgtaacatttgcaaaaagttcttccacttcatctgcgctcagtgtttccgttggtgcaacaacgtatgacatcttcggagtttcaccataggaaatttcttcatatccgagatacgctgtgatcacttctgacttattcactgtttttaccggaacccacatagtaacagttttgtattttttattatctgccggcaggaaggtcagttcaaattttgtctgatctgctacttcctgatctgtcacaacatgagctgcatcttcaaacttccatgttcctgccggtgcattttcaatccatttcaatgtagcttctgccagtgtctgaccatattcaacctctacttccggtgtaggaagttttggttcaaatatcatgttgctgtttgtctcatagatcaaccgtgacattggttcatcaataaagttaagcattactgttccaaggaatcggttatcgatacaattctccttatctttatataaatccgaattgatatctcttgtcatattcaacggaattccatttgcacaggaagtataattaaatacccatgaattagaatcaattggatgacttgtatctattcctgttgtctgtttcattgttcctgctatatattcccacttctttgaataaatatcacagtcatatgtattatatgcatcctggatatacactcgattttttccatcatcatatgttttatatgcatacttataatctctataactcacatcatcccaattggtaagatcaagtcccattgcacgcgtctgccaggcttcataattttgagttaatttaaatcttcggataagtacaatttttccacgagcttccttcattgatggaatgtctccctcagtgtacactttatcctgatgatttttcacaaattctgcaactgcatgctccattcctactgtagaaccatcatccggttttatcgtaagaataattgtttctgaaggatgtttttccaaaaaagcaagtgatgtattaaagattgactgtaatgtaagatcacttccgtctttttcctgacactgccatgtatcgcctccatgtataatcttcacgtctgccgcagaagcatcgtcttttgttgcatttccacgaatatcaaaactacgtgctcccacattcaactgctcatcataataaagattctgacaagatgtgagtgataaacttgcaacaaggtcttgtacaacccctgctgttcctgtatcatgtgttgccggaatatttacagaagataatagtgcatcatctggaatatctgccatccattcatctgcgtaaccgtaagccgtatcatttgtacttcctgccaaaattgacacattcatagccgtcgctgtatgaccaatccatgtctcgccaatcccctcttttagatacataccgcttctggcattcatgattttatatgttccatcatcctgtctaaagaagcgccacagttggctggtattttgatttctgtcaaaactttccttattccagatatgtactattgtatttgcacaacctgattctcccagaacatctatcgcataattggtatctttctctccatccgatatagcttcaattctatatgcctgatagtctggataccaaaccagtttccatttactggcgatcccctgttctagaaaaagtaactgtgttcctgggagtgactcatttgaaggcctgtttattgcttcatgtgtttctgctttatagatttcagaaactacacttttatctccatcttttaaaatctgtgtttcctttcctgtgagcggaaccaccgattttgtaaccagccagacttttctatctttttcttctgtctgaataatatttggattattattattcaaatttcctgagtatccaagccatcttccactttttctattctttatataatatcttttatttccgtttgcatcatttccaagataataaaatgcaaattgacgatgctcttttcctttgactttctcatcattactttcccatacatgtatctttgcaccgctatctttactttcatcttctacatctgcgaaacgatctgttccattcaccttaatgtgtttaattccataccatccgttttctattttatccagacgaaaacggcaattaccgccttctccggtatccaaatgtacatcgcttcctttctcgccactgtcatttacattccaacgataatctgtattttcttccaatgtaataaataattcactgttcgtctccatatttgtgtccagcgttccactggaatctgccgcttttacactgattggaatccccgtaagtgctatcgtcatacatatgagcgctgccattatcctttttattgttttcatatccgtttttcctcctcatttgtattttgctatattatcggcaatcatatttcttattattatatttttgataccagattgttcaatatttttgacatgaactgtctgaaaatggcacgaatcgtcattctgtggtatactaatcctatgtcaaaacgtttgtatttaatatgaactgtgcaaacctgcacgacaacactttatggattatctatttcaaaaggagggattttgatgcggactttaattttccagactttggaatttacagttttgattcctggtgtgctgcttgcctatctgccggtaagatcatctctgaagcaaacacctaagaagctggctgtctggatgcttccgcttcttattatatgctcttgtttttgtggttttgcatgctatagattccatttgtcaacaagatctgttcttcttcctcttttatttgttctatttgttctatatcatagcactttattaatttcactttggaaatctgtcagcatctttcttgccgtctgtgcagttttttcctgctttaacagcctttccagagctgcttctgcaatgttgaattttggttctgaacaccttgcattttccggtttttctacttttggaatcctgtataatcttttctgcattcttttcgtccttctcatatggtatccagcctcccattcagtcaaagaaatggtagaagatgaaaatcttgctcagacctggtatgttttctggattctcccggttctggtcatcggattgaaccttgctttgattccaaaatataataccatcctgcacacgcagcgttttctgcgtggatacattgtgattgtttatgctcttctactcatccttgcattattttactcgatgtttttaatgatggctaatatcctgaataaaaacaaaaaacttcagcaggaaaatctttttctttctgtacagcaggaacgatatgagaatttaagaagtgcgattgaagaagccagacaggctcgacatgatattcgtcatcattttttacaactttctgccatggccaaagacggtgatttagaaaagatcaaagaatacctgcaaaatgcaatggataaaatccccacccttgattatcacttctgtgaaaatcactctgtcgataacgtaatcggatattattatgcgcttgcccaaaaagaagaaattccatttgatgcccgtgttgatcttccaaaagaactttccgtagatgaaatggatctctgtcttattctttccaatctattagaaaatgcattggaagccagtcgcaaaactaccgctgcgcagcagcagatatcgttggaaatctatcaacattctgcttctattcttttaatccgggtagaaaataattttgacggaacgatcaaagaaaagaaccatctgttccattccaccaagcgaaaaggtctgggaatcggtacccagtctgtccgcagaatggcagaaaagaacgatggttcttgtaattttacttatgaagatggagtctttaccgcaaaggttatgcttcgcgctgacctttaaaaggctatgctttctttcttcctcttactgctgccacgatcatgcaaagaagaattgtcaaaaccatatccggaagtgtatttccaagcagcatatcaatattcatcagaacacggtataaaatgaagccggccagccagatcaacagattacaccaatcgaatcctgtttccgattttttctttttcagaataaagaaatctgcaatctgcactgcgatcattggcgcaaatacagagccgatcagatacaggaaatctgtgatatcgtccatcggatagacaattgctccgatggtaccgatcactgttacaactacagcaacgtattttcctttaagtcctgcaaagatggattcacttgaaattcctgctgaataagcatccaggaaagtggttgtaactgttgaaaatacaatgatcagaagacctgcgattccaagtcctgcttttaccatgatctgtgcgatatcactttctcctgtgaacaatgcagcacccattccgaccagatacataaaacagcttacaactccataaacaactgtactgactgcggttgccttcacaggttctttcgcctctcttgtataatcactgatcaacggaagccaggacaatggcattgcaaccgcaagttctactgctgctccaaaggaaaatgtctcatcggtaatggatgtaactacagttccatcaaagaaaataatcttaaaaagaatcaatgtaagaataaaaagtgctgccatcgcaactgtatttacctttccaagattcgtaattccgatcagaatccatacaatgatcaatgctcctattaccagacaccatacccagtgtcccactgtaaagatgcctcctgctgccagtgctccatcatagatcataattgcagtccatccgacaagctgaagcacattcaggattgcgaaaagctgtcctccatgacttccaaagctgtcttttactgtctccatggcactttttcttgtcttaccgccaatcactccagccagaaacaacatgatacatccaatcacatgtcctaccagaatggctgccagccctctgccaaatccaagagctgcaaaatatgtccctgtaagaatctcagcaatggagactcctgctccaaaccagattaatccgttctcaaataatgatgttcttttttccatagtttatgcctctgcttcttttgtatattcattctggatagcaaatccatgatccattggaccgcttcccttcccaaggtcaagcattgctgcaagtgccccagagatatactctttcgcacgctccacagactcctccaatgagaatccttttgcaagattagaagcaatcgcagaagacaatgtacaacctgtaccatgagtattcggattatcaattctttttccgttaaaccatcgatacgctccatctgcatacagcagatcattcgcatcatttaagttatgtccacccttgcagagtactgcacagtgatatttttctgaaatttctttcgccgcatcgatcatctcttctgcacttgtgatctttcttccgatcaactcctctgcctccggaatattcggagtcagtacacttgcaagcgggaataattcttccttcaatgtatccgccgcatcatcactgatcagcttcgctccgcttgttgctaccataacaggatctactacaatattctttgcttcatactgacgcagcttcgctgcaataactttgatcagttctttatctgaaaccatcccgatctttacggcatccggatagatatctgtaaagatactgtcaagctcctgtcctaaaaattccggtgttgcatttaatatagaagtaacacctgttgtattctgcgctgtcaatgcagtaatcgcactcattgcatatactccattggtgatcattgtcttgatatcagcctggattcctgcgcctccgctagagtcacttccggcgattgtaattgctgttttcatgttcttggcctccttcttttttaaaaacgggtacaaaaaaagcgggtgatgggaatcgaacccacgtatccagcttggaaggctggtgttctaccattgaactacacccgcgtgtcttgtgttatctctgacacgagttatatcttatcatacgtatcagagatatgcaagcacaaatttaaatttttctaagtttttttaattttttgtatctaccttattacaatttttgcaattccatcaatttctttcttaatctcatattttcctcttctgctttatcagctctttgtttttcttcttctgctctttgtttttcttcttccgctctttgcttttcttcttctatcttttgcttctcttcttctagttctcttgcaatgctctccttcgcttgagccacctgttcggctaccttctctgccacttgttcttcgacctgttttgcaacacttgcctttacttgtgccaattcttcttccatctcgtcaatcatcaactttactgtattacgatccaaaatctcaagttctttcgaaaacatctccatcattccttccatattaagacagagtgtatagatttcttcataaatcttctgaaaatccgaattttgattcaaaagttttataatcatctccggatcatcctgactgagaaatacgagccactcttccaatctgttttttatctttctgttttcattttgaatgatgtcactaaaaatgtcaagacatataaaagtatattcttgcagtaaattcacttctactcctgtatcacttttttgttcgcaatggtgaatatatatttctttcgaaaacctgcggaaatcagcgctgctcttttcaaataatacaattgtatagactttctgaattctcttataagtaaatgaatttcctaattctgcgcgcactcgtttatactgtcgtaacaataaatcagaagaataacaggcacttctctgtccgggaaataaatatcccattttttgtacttcaacatttgctatactgccatcttcaaactgaacaacaatgtccataatcaataaggagctctctgctgcaatacgcgctgattcattcggaagtacttttaaaattctaatttttcttcccagtatttctgatagaaaatcatttaacctttcgggtctggtatccggattcataataactttaaaataggtatcatagagaagttttacaccttttacaccagtgcaaatgtcaagatattcctgttggtatttttcttcccaaccgcaaaatgtcttccacattttcgggctattccggatttcttcaagcacttgtcctttggttctgatcattgggaaatagttttgtaatttgtttttcatcgtttattttgatgcgatatttaaaatagaacagtcctcttacctgcccaacaccaacttcatgaattggtatgttctcagaatatcccagtccacttttaattgcaatgtgtttcttgtttataactcatcttttttgttgataatttgtggataactttacaaatcaatattttttcaatttttattgtcattttcgccaaaaaaacattataatataattaatttatagtcattttttgtccaaaacgccataattcaaaaaagcggagaaaaaatgtcacatggccttttaatgtatcagcttttctctctataatgaataaaaaggaggaggaagattcgtggatttatttaatagcttaccacttaaaaagcaggaatatatgaacaaaagatcccggcaccggagattctggtacttaaccagacacgagcgcgcatttccgaagaagtggggatttctattaaaactctggacagaaacatcagaaagctggaagagatgaatcttctgacgctgaataaaggaaagatcgtaattaccaaagcacaatatcttcagatgaaacaggatattgatttttacgtaaacggttgatccaaacttatgtttaaggaggggataacatgtatgtaggaaaaaaggttactcgtgtagatgcctacgataaagtaattggacgtacaaaatatacagatgatctctgtgataagagtgcctatattgcacgtattttacactctacaattgccaacggacgtgttctttctattgacacatctgaagccgagaagatacctggagttgtaaaagtatttacctgttttgatttaaaggaaaaacattattttccaactgccggacatccatggtccacagatgaatcacatcaggatgttgccgatcgtcttgtacttacagaccgcgtcagattttatggggatgatatcgctgcggttgtagcagaggatgaggtttccgctgcacaggcacttcgtgcgatcaaagtagaatatgaagaatatccatttgttctggatgttctggatgctatgaaagaggatgctcctcagcttcatgaaaaatatccgaacaatattctcaagcatacaacgatcagtaaaggtaactacgaagaagccatcaaagaaccgggactgatcaaagtagaaggctggtacagcacaccaactgttcagcactgtcatattgagaacttcatctgctacgctgagatggaaggagaccgcatcaaggttgtaagttccactcagattcctcatatcgtgcgtcgagttgtcggtcaggcacttggagttgaatggggtaagattcgtgtcatcaagccttacatcggcggtggtttcggaaataagcaggatgttttgtatgagccactttgtgcatggctgtccatgcagcttcacggacatcttattaaacttgatgtaccaagagaggagacctttgtttctacccgtgtacgtcatgcgatcaagagccacatcatttcatgggttcgcccggatggaacatttgctgcaagaaaactggaagcattttctgatcagggtgcttacgcatctcacggtcacagtatctgtgccaaaggagttggcgcattcccgcagctttatccttgtgataacgtagaggctgatgcttatacaatattcacaaacaaatccgttgccggtgcgatgcgtggttacggaattccacaggcaatgtgggctgtagaatgtcatacagaagacatttgtgcaaaacttaacatggatccgcttgaattccgccgcaaaaacctgatgccagtcggatataaggatgcattttctaaaaatgaattatacagcgacacattcaaccagtgcctcgacaaaggaatcgaagttactgattaccttcgtaaatacaaagaataccagaaccagacaggagatatccgcagaggtatcggtatggcagtcttctggtacaacacagctgtatggccaatctcacttgagacatcttcctgccgtatggtattgaatcaggatggttctcttcaggttcagctcggtgagacagagatcggacagggtgctgatactgcatattcacagatgactgcagatattcttggcgttccacttgaagctgtacacattgtttcctgtcaggatacagacgtcacaccattcggaacaggtgcttatgcatcccgtcagacttatacagccggattctcaattcgccagacagcactgcttctgaaagaacgcattttgaaatatgcgcatgaactgacaagaatgcctgaatataacctggatatcattgacggacagattgttcgtatcacagataaccgtgttctgatgtctcttggagatctttcaacagaagcactttacagcctttcacacagtgagcatctgtcagctgaaagtacagcacaaattaagtccaatgcttactccttcggatgtacatttgcagaagttgaagttgacatcccgatgtgtaaggtgaaactgcttgatatcgtcaatgtacatgacgccggaactcttatcaacccggcacttgctgaagctcaggtacacggtggtatgagtatgggaatcggattcggactttctgaaaacctgctctttgatccgaagaccggaagagcattaaataataacttgctcgattacaagttatccacatttatggatcacccgagactacgtgcttatttcgtagaaaatgcggagcctacaagtgcattcggaacaaaatctcttggtgagccaccgacatgttccattgcacctgcaatccgtaacgcagtttatcaggcaacaggtgtctatgtaaatgatgcaccggtgaatccacaccatctgttccgcagtatgaaggaacaacatatgtttgaggaaggaggagaagcaaatgtatgatcttaaagcactttatgaagctgaaagcgtagctcatgctatacagcttttacaggaacatccggaagcacagatcattgccggcggaagtgacgttcttgtacagatgcgtgaaggacgccgcgcaggaaaagaacttgtaagcatttataaaattgatgaaatgagaggcatatcttatgaagaagacggtgcgatccgcattggctctctgaccagcttctctcatattacaaaggattcgatcatccagaagcatatcaacgtacttggggaagctgttgatatggttggtggaccacagatccgtaacatcggaacgatcggtggaaacacatgtaatggtgttacatccgctgattccgcttcaacacttcatgcatgggatgcaattgttgagatcacaggaccggacggagttcgcagaattccgatccatgacttctatattaaagcaggagtcgttgatctgaaaccggcagagattcagacagcaatcatcattccgaaggaagcgtacgaaggctaccacggacattacattaaatacgcaatgcgtaatgcaatggatatcgcaacaacaggatgttctgtcaatgtaaaactctctgaggataagaagacgatcgaggatgtcagaattgcttacggagttgcaggacctgttccgatgcgtgcgccttctgctgaggcaaaagcaaagggcaaaccgcttacaaaagctgttgttcatgaatttggtcaggctgttctggaagatatcaatccacgtgacagctggagagcatccaaggcattccgtcagcacatcgctactgttcttgcagagcgtgcactgacagaatctatcagattggcaggaggtgtgatcgatgaataaacagtacaaattacttacctgcacgatcaacggtaagaaagtcgagaaaatgatcgatgtccgtgcatcacttacagatgttttaagagatgacttccgtctgaccagcgtaaagaaaggctgtgaagttggagaatgtggagcatgcaatgtaatcattgatggggaatgcttcaactcctgtatctatctcggtgtatgggctgagggaaaagaaatccttactcttgaaggtctcgccggaccaaatggtgagttatccgatattcagcaggcatttattgatgaagcagctgttcagtgtggcttctgtacacctggattcatcatgagtgcaactgaacttttaaatgccggcaaagaattctcagatgatgagatccgtaaaatgatgtccggtcatctgtgccgctgcacaggttatgaaaacattttccgtgcagtcaagaagacaatgcttcgcagactcggaaaaaatgaagaagcagacgctgtctaactatccaatatggaagattggttcaatcctgtacgaaggaatcaagatgctcaaagactgcgagttcaatgaccgcacaatgatcattgtatctctcgctttctgcgtcggcgttggtccttacacaaacagatgcgaacttcttcagcgctttcccacaggctgtgggagatatcttcaacggaaatgctgttgcaggtgtgttcgtagtatcactgctgctcagtctgattctgccgaaagataaaagtgaaaaagtagaagaataaaagaataaaaaagaaaaataacagctgtaattgaaaaaaaatttctcttacagctgttatttttctttttttaaaaggttttcttttaccatccagcttccggagcagacatcaccttgattatttgggcttccttctgcatattccgctcactcctttgtgctgatcttctccagacatgcaatcaattctgcctcacttcttaccactgcattcggctttacatcacctgctgcctgatgtccgcgatgattataccagactgcattccatcctgcagcttttgccccaacaatatcattttcaaaagaatctcctacatagcagatctcttgcggcaaaatccccattctttctgccgcacgactgaaaatcctcttgtccggttttgctaccccgagtgctcctgatataaatacatgacctactggaatccattccgttacaccaagcgcgttcactttgtcccactgatgctgcgccggaccatttgtaacgattcccaaagttaccttctctttcaagttctgcatcaactgtctcattgcatctgtcatcttgatttcatgctgtttttcttcataaattgcttggaattccaatgccttgagtgcatcaatcttcttcccataatcaagaaatgcatttttgaatcgatagatatacatctcttccatcgacatctcaccacttaaacagcgtgcatacacggaatcactgtatcttctgcttgccaaaaatgcgccttccagatccagatctttatcttccgggaaaacctccctgcatgtttccttaaatggagttgataaatcatataatgtgtcgtctacatcgaatacaattgctttcattattctcatcctgtcctttttccactccctggtaaactgctttggttactactcgcactacatacgactggcaatccattctgacagataccatgcttgttatctttttatcaatctattgatagtctaacatagtttattttgtttgactaggttcaattttgtccactattttataaatcttataagtatacgctaaccataaacctgattatcccttgcatcaccgtgctataattaaaattaaggtggttagaaacatttaccatctgctaaggattttgaaagaaggcattttaatgagaacttatgttacacactactttaactttgaatacatcggaatctacctgctcgtctcgctgatcgggctggccgttgtgattggtattgttcttggcgtagccaaattgaaaacacgccaacgactgcaggatgactccctgtctcacaaagcaatccgtcgtatcaaccgccaccatcaggagcgaaaaagaagtattattgaaagtttctttgagatggtcttcgccagcacctccgtgctgatctttctgtctctttactatgttattgacgagaggattccaggcgtgtccatctattggcagaagtatcaggatattatccttttactcttcctttgcttctccgttatcttaaatggatggcttgatattgtatttgtaccattggaagaaatagattccaaccagaaggcatccattcgattggtatcttccttttatattatactgatacttctgtatattaagtttatttacaatgatgacaactacgattcactgatgatgtacttcatcacgcttgcagttggtcgttttatctacttcgattttacaatggatgactttttaagcacacttcacggcttctgggaagaattgccactgcttatcctgatggcaagttactccggattcgtctgctggtttggattctataccggattcctgcttacgtctaacggtgtgatcgtcagcacgctgctggcgcatctttttatggtatgttcgatttttatattggataagacaagagtgctgagattggtgatgtgagtattatattataatgtttataaaaattgacaaatttatgttattttgtataaaagttaagcctatgcacaaagaagcagaatcattttcccacacgattctgcttcttttatttccttattatattcgtaactgttcagagccaacctccaaaatgctacgcatttcgtcggtatggcgtatccgccaaataaaatttcaaaaacatccttaaaaatgcaagccttttatacctgttttttttaattttgcttggctctgaacagttacttatatcccagacacaaccttaaccaataacagcaccagcacgatcagaataatcggcttgatcactttcaccccattattcacaaccattccggcacctacataatgccctgcgatactgaaacaggatgctgccagtcccagtccccacaggattttccctgccaggataaatgtgatcagcgctgaaatattggaagaaagattcacaatcttcacatttcctgtcgctttctccaatggtatcttcgcaagcttggtaaatacaagcagcaagaaggttcctgttcccggaccgtagaatccgtcataacaaccaatcaccaaagagcatgcaattgcgatcagatactgcttattctttgtcattccgaccggaacttccacatccatgttcttgtctctcaacacacagaaagctacaattggcaggataacaaccaataccattttcaaaatatggtcgctgataatcaacgccagatttgctccggcaacagaaccagtcaacgctccgatcaccgttccgggtacgaatccccagtctactttcttattcttaatcaatctcgctgtcgacactaccgttcctgttgaagatgacagcttgttcgtcgcgattgcattatgcaccggaatcccggcaaacatatatgccggaagcgagataagtccgccgcctcctgcaattgaatcaacaaagcccgccagaaacaccagcgggcatacaatcagataaatccccattttccttgttccttttcttctataaaattagatatcagagacaaacgccccgacttcctattgtaacggtttacaaggaatctgtaaatatcatttattgttgttttcctccgagatggcgaatcatcgctaacatggatgtgcttgcatgaagcggtgtaatctttatctccggatgctcttcctgaaacacacggaacacttcatccgcaaaaccgcgccccatgaattcaattccccggaaatcaatcacaagctccttgtatccttctgcatctttcagaactcttctcgcatgggatcttgccaccggatccacaaaaggcaatacatccttcagtattattgtttttacttcttccattctaccgcccgctttcctggtattttctatatctatttttaccatattttatcaagattttcaagttgtacagcatttttatttactctattctacaaaaaactcctctcagactgcatcttatcacaactgaaaggagttctcctattatttgcaagcagtgtaactactctttattttaattgttccggctcttcgacttcataatctgaccagctgaaatcttttacttattctctcacaagcaccttcacgatctcacccatatacatcgtatggtagtctttgcccggataccatttctcatccggtccgtctactgtaaagcactccggtttcatctcctgtgcataaagctttctgcatacaaagatcagatctgcttcttcatacgctgttgttccgtctgtgtaatacggtgtcagacctgcttctttatctttatcacagtcgcgacctgacttggaaccacaaagatttaatgcttttctataatcttccttaaagaaagaaagtgtaaacatctcttctgcatctacgaattccttcgtatatctctgcggacgaatatatgctgtagccacattcatcccccacataattccaacaccaccccagctggctgtcattgtattatgcttctcttcatctcctgctgtgatcaacatccattccttgctgatctttgtaaaagggttaaatgaaagttcctcaatctttacttctttaaatgccatttttgtttcctccttataagaagcggccgttactgtatccaacttaatgctacagtaacagccactatttctctacttcatttcaattattttgcaacaattctgcggaagtttttctttccttttttcacgatctttccttctccatcgaagtctgccggagcatatgttgttgtaatgtctgttactttctctccgtctacagaaacaccaccctgtgttacggcacgtcttgcgtcagatctggaagatgcctgtccactctttacgagaactgcaaggatatcaatctttccatcctggaaatccgcctcttccagttctgttgtcggcatgttatcagcatttccctggctgaacagtgcacgtgcactctcctgtgctttcttcgcttcttcctcaccgtgaacaagttttgtcagctcatatgcaaggatttcttttgctgtgttaagctgtgcaccttcccaagtatccatcttgtcgatctcttcaagtggaaggaatgtcagcatacggatacatttcagaacatcagcatctccgacatttctccagtactggtagaaatcgaatggggatgtcttgttcgggtcaagccatacagcacctgactgtgtcttccccatcttcttaccttcggagttcagaagcagtgtgattgtcatagcacttgcatctttaccaagtttacgacgaatcagctctgtacctgcgagcatgttgctccactggtcatctccaccaaactcaaggttacatccgtagttctggaacagctcatagaagtcgtatgcctgcatgatcatgtagttgaattcaaggaagctgagccccttctccattctttgcttgtagcactcagctgtcagcattctgtttactgagaaatgaggtcctacctcacgaagtacatcgatgtagttcagatcaagcaaccagtctgcattatttaccataagcgcttttccatcagagaaatcgatgaaacggctcatctgctctttgaagcagtcacagttatgctggatctgctccggtgtcatcatacttctcatatcagttcttccggatggatctccgatatatcctgtaccaccaccaatcagtgcgattggcttgtttcctgcttcctgcagacgtttcatcaggcacagtgccataaaatgtcctacatgaagactgtccgctgttgggtcgaatccgatatagaatgtagcctttccattatttacaagttctttgattctctcctcatctgttacctgggcgatcaggcctcttgcctgaagttcttcataaattcccattttccttctccttctcttttcgttttatttttctgtaacttctacagaatattcataacatgtctcttggcacaaaaactgtgaccagtagcattataacgcatcattcagcttggcctttttatatatccgaaaagaactttcctaacatataaaaaagtccttactgcatgacgcaataaggacgatctatcaccgtggtaccaccttaattcaccgacaacattttttcggatgtaagtataaaattcttacctttatgtctgtcagtctcattcgtgcaataacgagcacaactccgtcacagcctactctctgtctgatctgttccccatatcaatctatgaatttaaattctagtaattagatatgaatttccatcatcagatttcggtgtgaagctccaggatgtattcgcagtcagtcatctacgcgcctctcatcagccggcagctttctgtgtgtctgttctgtctgttacttgttcccttcacagccttccatatataacttctatataagagtcagaataaactctcgtagtcttgatgatagactattgtaatccttttgtcaagtagtcttgtatatataacaaagaatgtgccttggcacattctggcgcctgcggcggtcgcttgcgacacctaccttgtacgccgcagtgcgcatccctagcggagcgtttttatatattaggaaagaactttcctaatatataaaaacggaagtgtcccggctcttcgccgattccacttccgcttttgaaaagggattattaatgtgtgtgttatccgtattctttcacatcattatcccggataacctaattatcatttaaacttatttgcaaagtttcttgaactcgtcagctacaaactgaacttttgttccaatgattacctgaacgtctttctgagatggacgaacaacacctgcaacacctgcagatttgatcttcttctcatcaacctttgtgtaatctttgattacaagacgaagtcttgtgatacagttgtcgacagactctacgttatcttttccaccaacaccctcaagaacgatcttagctactgttgtgaagtcatcgtttgcaagaacaacttttgtttcatcatcatcgtcatcttcacgacctggtgtcttcagatcgaatttaacgattgcgaaacggaatacaacgtagaatacgatgaaagctgcgattccaagaggaatgataagccatgtcttagctgctgccggaaggggagcagagaagataaggtctgtaagtcctgctgagaagctgaatcctgcacggaatccaagagctactgtgattactgtaaagataccatacagtaatgcgtatacaacgtaaagtgccggagcgaggaacatgaatgcgaactcgaatggctctgtaacaccacaaacgaatgcggaaattgctgcagatgcgataagtccgattgcaactttcttcttattgctctttgcagactgaatcatagcaagagctgctccagggataccaaacatcatacatgggaagaatcctgacatgtacattccaagactccaggaaacgtctgcagatgtttctccattccagaagtgtgacaggtctccaagtccgattgtatcaaaccagaatacattgttcagtgcgtggtgcagaccgaacgggataagtaatctgttaaagaatgcatagataccagctccaagagctcccattccttcgattccttttccaagtgcaaccagtcctgcaaagagtaccggccatacaaagagcagaactgcagatacaataatagaaacaacacctgcaacgattgctacacaacgcttaccactgaagaatgacagccagtcaggaagcttagttgatttgaatctgttgtagcaaagtgcaccgatgataccggcgatgataccgataaatgggttttcgattttgctgaatgcgataaatgctgttgatccttcttccagtgttctaagaacagatactgctccagtagaaagaaggtttgtgatcatcagccaggatgcaagtgcagcaagacctgctgtaccatcatggtcatcagacataccaacaccaacaccgattgcaaagaggagtgccatatgatcgatcaaggcaccaccagcttttacaaggaaaaatccgatctgctcaacaacaccagttacatctccaccctgcatagtagatggacacattgcgtatcctaatcccatcaggataccacaaatcggaagacaagcaacaggaagcataagagcttttcctaatttctgtacgaatttcatagaattccctccttaataatctctcatttttaatccctttttattttaaccggcaaatgagtcctccggtcaaaatcaactctgatcctccgggtcttccacaaagcagagaaccatctatgacaaaagcgccttgcgctaaagtccaattttacagtagctgttccctaatacagccatttctttcgttaccgttcaaagcaaccctctattcgtcctccgaatccgccatcgcaacacggcggatatggagtgtcagatacaaaacttcctctcctgacagcttgcagtctgccgtcttttctatgtaatctgcaacttttctgctgcaagaatactctctcggatactttctctgcatcatctctgtaatctcgttctcttcctcttcaagtaactccttgcggtaaatcctctgaagaaggaacttcacgtgtgtcagaaatctttcataatgcaatgagccttcatccatctcaatcccaagttcttctgctacgattccaagaatctctttcatctgattcggaaaccgtactgcatcccgaatatcagtcccatactctgcgttgacaaaatgtaatgcaataaatcctgcttcgtcctcaggcatctctacattcagtctttttttcacaagttctaccgcatatcttccgagttcaaattcctgtggataaaatcttttaatctcccacagcaacgcattctcaagatgaatcccctttttacagcggctgattgcaaaactgatatgatctgtcaatgtaacatagatgctctgatttaacttcagcttcattgtcttctttgcataggaaatgatctcgttcgagatctgaacctgctcaagcggcatcttcgccagcaattccttgagctgttctgctatgctctgactcttgatacggaaaaccttctctatcttctctgcaggaacttcctgtccccgcttcatctggaatccgattccgcgacccatgataacaacttctaagcctttttcgtcaaatgcagatacaatattgttattaattattttgtctataaccatccgattggcctttctctaactttgggaaaaactccctcataataaaaaagccaaactttaaggcatcccccttgattccttcggtgacgctcataaaatctggttttgcctgcctaacagtaacaatccttctttaatgataacaattcgtcaatgttatctcttttctacgtgattcagtataacaaacctgcacataaaagtcaatcaaatattttataatttgttaataatatttatattttttttatacttttacataatacgcgatttttttcgttattctttacaaaaacaaatttcagacatacgcttaaaattcgtctctgcctgaaatttggttctgtctactgacaatcaccacactgtctagtctaacagcgaaacggttcattgtcaacctttacaaaaaattatttgcttttttcatcaaggtagtcaattttaacaagcctcagtccctgtggtggaactgtcattcctgctgcctggcgatcctttgcctcaagaatggccggaatctgttccggggcaattgctcctcttccgactccgatcaacgtacctgcaaggattctgaccatattgtaaaggaatccatttccacggacacgaattgtaataagctcttcctctttctctacttccagatcataaatcgtgcgaaccgtatcttccacctgagtatgaacattacagaagctcttaaaatcatgttcccctttcagatatcctgctgcttctctcatcttctcaagattcaggtcaaatgaaacatgatacgtatctcttcttctcatcggatccggaaacttgctatttaagatcttgtattcatatgttttctccgtatcacaatgtcttggatgccagtctgctgccacttcatccgaagctacaaccacaatatcttccggaagcagtggattcaatgcataagcaaatcggtctgccgggattgtagactctgtgtcaaatacagcaacgtttcccttcgcatggactccggcatctgtgcggcttgccccgatcacgataatctcttccttcgtaagtctggagatcgcctgattcaattcaccttcaatcgtcggcacttccggctgcacctgccagccacagtatgctgtcccgtcatacgccactctcaatctgattcttctcatatctgttctttctcctatactatgagaaacacgctccgcgagtttctcaagttatcgcggcagtcgccaaggtctcgtgcaagcacggactttgactcgttgctcgcgtaaataaaagggacagaaatatccgtccctcttctctatttattttattctaaaaaatccacaatttaaacggcacaaatcttccgatcactacaatcgcgatcagatatcccaatgtgattgcataagcaagtctgtcctgataatggtatttcaaaggcttcatctttgtacgcccttcgccaccgtgataacagcgggcttccattgccatcgccagatcattcgctcttcggaacgcagacacgaaaagcggaacaaggatcggaatcattgcctttgctctctggataatatttcctgattcaaaatcagctcctcttgcgatctgcgccttcatgatcttgtctgtctcttccagcagaatcggaataaaacgcagtgcaatagacatcatcatcgaaatttcgtgtaccggtacatggattcggttcagtggatgaagcagcttctccagtccatctgtcagtccgttcggagtcgttgtaaatgtcatcaaagaagatcctgcaacaagcaatacaagacgaactgccatgaacacagaagtacgaagtcctgtctctgtgattgtaatgattccccaatggaataacactgcaccgcctcttgtaaggaacaagttcatagccactgtaaacaataacaagatcacaatcggcttaagtccttttccgataaactttgccgggactttagaaacgtgaatcatacacgctagaaatacaaatgccaatgcatatccaagcacactgttctgcacaaataaagaaatcaaaaagatcagtgtgcagacaatcttcacacgcggatccagtctgtgaatcggactctgcgccggataatactgtcctatcgtaatatctctgatcatgactgcacctcctgtctcttcttcaggaagttgtagatctcgtccgcagcctcttccacagttgttgcatctgctgatacatcaaatcctttttctttcagatcatgcattacatatgttacctgtggtgctgccagtccaacagcctcaagctctttataatggcggaacacttcttccggcgtaccgtcaagcatcttctctccatcattcatcacgatcaggcgctccacgtatttcgcaacatcttccatgctatgggaaacaagaattactgtcattccggtcttctcatgaagcaattttacctgatctaagatctcatctcgtcccttcggatccagtccggctgtcggctcatccagaacaagtaccttcggatgcattgcaagaattcccgcgattgccacacgacgcttctgacctccggataattcaaatggggactgcttataatatttctccggaaatcctacaagctccaaggcttctcttgcctgcttctcgcactcttccttggaaagtccctggttcttcggtccaaaacacacatcacttaacacatcaacttcaaacaactgatactccggatactggaacacaagtcctacctgtgtacgcagtttcttcatatcatatccgtcctcgtaaatgttctgcccctcataaagtaatttccctgaggttgctttcatcagaccgttcaaatgctggatcaaggttgattttcccgaacccgtgtgtccaatgattccgacgaactgtccctgtgggatctcaagactgacatccttcagcgcatgatgctcatatgcagttcccgggctatatacataactgatattttctaacttaattgacataaggcatccaccaattcttcccttctaagaattcctttcggcagcggaactcctttttgaatcaatgcgtctgccagcattgtcacctgtggtacatccatacggtacttcttgagttcatccacctggctgaagatttctttcggtgtaccatgcatcaccacatgcccttcatccattacaaatacctgatccgcatcgatcacttcttccatataatgtgtgatcaggatcaccgtaacattcttctcttttcgaagctgctctaccgcttcgatcacttcttttcgtccattcggatcaagcatcgcggtcggctcatcaagcacgatacacttcggctccatcgcgatcactcctgcgattgccaccctctgcttctggccgccggacagtttattcggagaatcctttctgcgctccagcataccgactgcacgcagactgttctctacccgtttccagatctcatccgtaggaactcctaagttctccggaccgaatcctacttcctcttccacaacagttccgataatctggttatccggattctgaaataccataccggcgctctgtctgatgttccaaagctcattcggatctttcgtatctcttccgtccacccacatcgttccacctgtcgggacaagaatcgcattcatatgcttcgccagggtagactttcctgaaccgttgtgtccaagaatcgccacaaaagacccctgcgggacatcaatgtcaactccgtcaatggcgcgatgggatccgatcacattaccttcttcgtctcgtttatcatattcaaatacaagcttttcagcacgtatcattcccatggaatataccgcctttcttattataaaaatgcataagaaaataaaactttctaatgtctctgtatcgttattagttgcataaggcgaactgctgaaaagcaattcaaaatttattttacggtatcataaaaagatttgcaagcatgcatacagtaaaatacagtaaaatgcgaaaatttagttattacagcacctttcgtccattgaacctccattccgattatgatattcttatcttattagaatatagaacagaacgaacctcgattatcacatttctggttactgttcacacgatgtgcgaccagcaaccatttctgttctgagtaatactagaatgaggaggcacatattatgtcaaaatacgttatggcattagatgccggaaccacaagtaaccgctgcattttatttaataaaaaaggggaaatctgcagcgtcacacagagagaattcacacaacattttccgaaaccgggctgggttgagcacgatgcggatgaaatctgggcaagcatgctcggagttgctgtggaggctatgaacatcatcggcgcagaaccttctgatatcgctgcaatcggtatcacgaaccagcgcgagacaacgatcgtgtgggataaaaataccggcgatcctatctgccacgcgattgtctggcagtgtcgtcgtactgctgaattctgcgattctttgaaggaaaaaggactgacagaaaagttccgtcagaaaaccggccttgtacttgatgcttatttctcaggaacaaagatccgctggattctcgacaacgttccgaaagcaagagaacgtgccgagcgcggagaactgctctttggtacagtagagacctggctgatctggaaactgacgaaaggcgcagtacatgttacagactactccaacgcatcacgaaccatgcttttcaatatcaatacattagactgggatgacgagattctcgaagaacttcagatcccacgctgtatgcttccgacaccgaagccttccagctgcatttacggagagacagatccatccgtcctcggcggagcgatcccgatcgccggtgctgccggagatcagcagtctgcacttttcggtcagacctgctttaaacctggagatgcgaagaatacttacggaaccggatgcttccttctgatgaacaccggagagaaacctgtcttttccaacaatgggctggtcaccacgattgcctggggacttgacggaaaggttacatatgctctggaaggttctatctttgtcgccggtgcggcaatccagtggcttcgtgatgaactgcgcctgattgattccgctgacgactgcgaatatatggcaaagaaagtgaaaaatacaaatggctgttatgttgtgcctgctttcaccggactcggtgctccatattgggatcagtatgcccgcggaacgatcgtcggtctgacacgtggggtaaataaataccacatcatccgtgcaaccctcgaatctctcgcttatcaggcatatgacgtcctgactgccatgaaggcagactccgacattaatcttgcctccctgaaagtagacggcggcgcaagcgcaaataacttcctgatgcagacacaggctgatctgatcaacgcacctgtccaccgtccggtctgcgttgagacgactgctatgggagctgcttatctggctggtcttgcagtcggctactggaacagtcttgaagaaatcaaagagaactgggcgatcgatcagatctttgaaccttcgattgatccggaagtccgcgaaaagaaactgaaaggctggcacaaggctgtcaaatattccttcgactgggcgaaagaagattaacatttttatatctttgaaaacgaatttctgcataaagagcatatagaaaagctgctgtccgtctgttgttcacgagtcccgcaagcaacagttcagacagcagctttttacatttcatattcttctcttttatttacagctcatcaagactttccttgaatccctctccaagcacctcactcgtctcagtgaacattacaaacgcagagtcatctacctggtaaactgcatttttcacaagatacgcttctgacttggaacatgcacagagcagaacatttctcttactctttgtataagtacccattccttccaaagatgttacaccacggtcggtgattcttccaatctcttccgctgtttcctctcccttcgatgtaacaatgattgcaagtgttcctgcaccgattccgtaaagaatcttgtcaattaccacagagcagacaaatactgcgatcaatccataaagaactgagtcaacatcaccgaataccggccatccaattaaaataatgatcaagtcgatcaacaacgtcagtcgaccaagagacatatgtggtctcttctttttgatcgtcatcgtcaggaaatctgctccgcccgaagaagaacctctcatatagaaaagaaccatcccaagtccaagcaatgctcccgagtaaatcgctgcaagcagacgctgtcctgtatagtatgggaacatcggaaatacaagatcgacaaaaatggttgaaataatcattgtcctcgcagtcttcatcaaaaaccgctttcctactgttttgtaactgatgatgaccagtggaatattcaggattagcgtcattgtaccgaccggaagattccataacttgttcataatcaaggcaatacctgaaattcctccaggcgcaaaatttcctccctctgcaaatgtatagattccggcaccaaacaaaatacttcctataatatcatacaaaatatccactgcaagctctttcttcggatgctcagcccgcatctttttattctccatcataccatttccctctcgtttacatcttattttctattctgtcgcttttgcgttcggataaatcttctccatcttcgcatcatcgtaatgctcatctgcccatttctgaatgctgttttccgctacaacgccctttccacgttcgtcataacgaacaagtgcaatacatgacacagccacattacagaccatgaaaatgatcaaaaaccaggtaagcatcttccctgtcagcatcgggattttctcaatccatgcggaaatatatgggtaaatcttcttaaaccagacaactgctgcaattccccagaagaagcagtataataagttgattcggcctcctaagttaaatggaatctcgctatagtcccaaaatactttcccgaatacaatttccgtaaacacactacaaagatattcatacgctccaccgagcaatgtaccgatgataaataagaagctgtcactcttatctttatatttgtaaagcattgctgtcacaagtgcgatcgccagtccccagacaatactgaacggtccccagaccacactggagcgactcatccacacacctgccgtgattctgcagaaaatcgtctctgtaatgtctccaagaaatgctcctacaaaaaacaacagcacaatcttatagaacccacagcctgcggcaaatactttccccttctccgattcttcttccttgcggatcagttccattgcctttggatacgctttttggatacgtttcccaacccatccggaaatcgcacttccaagcttattgctgactttatccagaccttcattcgtagcttcccaccgcgcgaggttctttccttttccacgaagtagcagataagatccgaggatatccacaaccaatacgccaagaagaaccaatacaaggatcttcatcaggaacagaggtaacattttaaatactatgattgcaaatctgtttccccagcggattccgagatatccaagagcaccccagataagagaagccgggatacagatatatccgtccagattccatttaatcctggagtaatcccaccatctggctttaaatgccttctcgatcaaatgccctgcaacccattcgatcactgtagcataaatcgttgcaaataaaaaaagccagactcctcttagctcctgtaatccaaatgtcatgaacagagcggcgataccgtagatcacacagaacggtccattcaccagacctctgttcgcaaacttcttctgttttactgttgcggccgctgtctccagcacccatcctaagaaagaatagatgaaaaacagccaaagcagttcataccatgtaaaacgaatcattgctccatctcctttgtaccatgttttcattcacatctttcttagtataacgcaaatcagtgctttttcctagggataaatccaaaaataattaatactccgatcaacccgattccaacataaccggctttcctccataacgtatctctctcgatcagacgctgatcttcctctatcgcttccgttctgttctgctcggaagtggtgataatctcttgctggctgctgtccgcctcttctgctgcatcaactgctgcctccggctgtgttccaacctcatcacaatacacaacatatcttctggaattctgcgtataaggatgacatgtcatcaaagtcaccatattccgccccggctgaatcatgatcttgtcactctcatccggcaggataatctcaatctcagacacacggtacgtcaatgtttcctgacagttttgtatcgtcaattcatctccgatctccaaccgctcaatctcgcggaacatcggaattcccttccatcctctgtgcgctgcgatcacacaattactgtctgtaccctgcaccggaaatgaagtctgtccaagcatgaccgcacctctcgccatcttctcctgcgttgcgccgagatataacggcaatgtcacatccatcttcggaatatcaagaatcccgatcatcccgtcatcaatcccatactcggacagatccaatgtctcctgctcgtaagaccacggatcagtcagtcctgactgaccatctgaaaagatctgctgattatatgcctgcatctcctggtagagctgggcgttctttggaatctggttggaatcggcagagatagagtctgtctgattcgatacactttgttctgcttctgtctgatcctggaactgttccatcactttcttattctcatatcctgtttttaaactgttaagatccggccacgcaaatacaattacaccgccaagatagatcaacacacagagaaccgctgccagcctcctcattttcccacgctcctttctctcatcagaatcctttccatatataaaatacgctcttctttctgaacttcatctgtcttactgttgcctttacaagcttctcatactcgtctcgtgcaaactgtacatcctgctctgagatttcctcatatccataatgcacctgaagaacaagagtcctgaacttttccaactccttctccgtaaattcctgataacgcagtgcaacttctctttcaaattcttcttccgttgtatccacatcttgtggaaatccaccaaacaaaagcacttcatagaagctgcagaaaatttcttttaccttctgttccttcgacaattttcttccgttgccccgtcttcttccggaaatccaacgtctccttgcctcgactaatagtaagaatagaagaattccgctcacaatttctactgttttgccactgaaagctttctttgtatctttaaaaagatctcccgcttcctctttccagtttttcttctcttcctttttgtccttctgatccttcactgaatccgtctgaacatcggtactttcaacattctcaatcgttccgtcaaatccaggtgttgtctccaccggcatccatccggcacccggcacatagatttccacccatgcatgtgcattgtcatcctggagaactgccgagtaattcccctcactgttttccgtaaataagtttgccggtgccgcataaccgactacatatcttgccggaactccacactcacggaacatcaacgccgctgcggaagcgaatgctgtagaatctcctttcttcctgtcaaacagaaaatattctacataatcttctcccttcggcagcttttttacagattctgaaaaggagcattgtttccagagcgtctgtcttatgaactgcttcacatccgtgatccgctcactgacaagatcatccttctgctcttgtgtgatatctccgctcattttctttttccactctgcttttttctccttgcacattttcttcagctgtttcagatctgaaggaacatcttcataattattttctacatatacctcataagaagtctccacttcgtcaagtacactttgctgatcatcctgctttgcccactctgtcatttccttctggaaatctgtaaccggaaaccatgcataactgtcatcctgcgctgtctgccctgcaactgaaccatctccgccgatcatctcataatagtcgttcagataagcctgatatggaacataggtatactttgtatttgcattcaatctctctaccgtcatctgctctggctgctgtgtctgcgtatacatcattcgcaaaaacggaagattctgcagatagagaagggaatttccttctgttttccagttgagagccgcatcctgcaatgcatcttcatctcccggtttccagctgtctccggtatattctgatccgacaaatccttttaaatacagaacctctttcggctgtgcagatgtcgtcacacggatggattcgattccatcataggaagatccttcgacatctcccaattctccgtccgagacaccacctccgaccccttcaagcgaaagattcaacttaccacctgatattttcggaaggaaatcatagaggaactgcattccatgaactttcacaggcgctgatacatctgataacgtcacgattggctttgaaagaaccggtccaagcaggtaaaaggaagtcagaagcagaatcgttcctgctgcgatacacacgacagaggatctgctctgaattcttcgaaccgcccggagattctgacgaaatgcctcgctctcttctccgccccagaacttctttctcacacggattccggatgctgccgtgatgcacaagaaactaaggagtaatagaaaaagagctgctttcgatacatttcccccacttagcagaacaaccagtaacacaggaaatgtgatcaacagaaaatatcctttctcgtgtctcttgatcattccctgtgcaagaatccacacaacaccaaggaacaaaaaaaggaaaaacagtgtcgcagaatttccggctcctgatggcacactcaaatctccctgataagaccggttcaactgctctgccatctgcatccacacataagaaatgcttgccatcaactccttctgtatcagaaacatgaccagacaaagcacaaaaacaactcctaaaaagagaaacacgcagtattttttcaaccgtctttgttcataatataatgtaaagagaacacagtacacaagcatcgccggataaacgagccattttgcaaatgtaatagaaaatgcttttgtaaacagcatacaaagagctactgcacttagaaagcacagtcccgtcatccaccagaacgaggcagaagaaagtctgtctccctgcggatcttcctgtagaatccgtctgcgtaccacacggattcctgtctcttctgtatgatttgtatttttcctctttacagttccagttcccattccattaaatcctcttccagtttctcttgtcggaatacttttatacatcttccaccatgataaagtttccctgaaatatcaagctgcattccgagctcttctgtccgctcgccaaactgccggaaatataattcctgaatctcatatgctttcgaatatactctggaggaacagatctgttctaacatacgaaaggtttcttcctccgaagaaacatccgcttcctttaacatctgattctgttcatcccaccagatcactttgtgatgccagttctgctcctgcatagaccatgacagtgaagccaggatttcaagaaaatgatccagcttctgctgtgtaaacttttcttcttttccaatatgcagatcaagaaaaagcaatactgtgcgttccattggcagactatattccttcaccataaaatcatctgtcttcgcagataatttccagtgaatcctgtgagaagtatctcccgaacgatattctctgatgtcaaatacttctgaagtatcctcaccgattctattttttgaaaacagctgtccttccagattttcttccagttgaaatgattgctgcaccggtattttatgaatcatcggaagtaccatcacttcttcggattgatatttcttctcgctccctctcgaaaacaaccgcagataatcctgtgccttcaccttctcaacagacactttcactctgccacaatatttcgcttcaaggaaaaactgtaaccgcacttttttccttgcctcggccatcgcagtatcctttgcgccgaatctgctttttgtaaattcattctcacagctgatttctacaggaattgattccatcggcatgaaagaatgattttccagttcaacttccaccgcaaattcctgtcctttctgtacataccggaccggaacgtgcaaccggaattcgagatttctcgcaaaatactcagcctgaagaaagagaagtggaagcatcaacacttcatatgcgaaaagtgtccggatcaaagctgattcccagaaaagcgcaatcacaagcgtcacaaataagattccgccatatatttttttatttctcatatgcctgtcctacttcattctatagattttatcgtctctgcggcaccggttttttcacagtatctaacacttcaccaagcactttctctgcggtcaggtgattcagacgccctttcgaactcagacggattctatgctccgcaacattacgaaatacatctgaaacatcgttcggaatcacatagcttcttcctgagagaaatgcagatgccttagccatcttcgcaagtgccagtgcacctcgaggactgactccaagctcgatcatttcattctttcttgttgcatccacaaggttaatgatatattcatagatcacctgatggattcgaacctcttcggtcagcctctgcatctctttcaactcatcccggaagattaccggctgaagcgcatccatcggattcgtcctgtctctgctcataagaatctttaattcatcctgcttctccggatatccgatctgcagactgatcataaaacggtcaagctgagactccggaagcatctgtgttccggcagatccaatcgggttctctgtcgcaatcacatgaaatggttccgggagcacatgtgtaattccatctactgttacatttcgctcttccatcgcctccagaagcgccgactgtgtctttggggaagtacggttaatctcatctgccagaaacagattgcacataactgcaccttcctgatactcaaaacttccgagttccttcctataaagagagaatcctgtaatatctgccggaagaacatccggagtaaactggacacggttctgttccagatcaagtaccttcgcaaatgcaagcgcaaggctcgtctttccgactcccggaatatcttccaccagaacatggcctcctgcaagaattgcttccatgattttctccacacattcatcttttccaataatcacatgctctacggcatcaatcgctttctgcagcttcccataatactccattgcttactcctccatgtcctgtttcttatgttttaaaatcgagaaaaagataccgctttcaatcagcactgcgacaagaaatgcacccagaagccacggccatacatcaacaatccgcttcgtcaaagcgcctgtctgcatctgattctttgtctgcttatcctgttctcctttatattccgtccgttctccacgaactaaaagccgatgagagttgatcgcatatggtgtacatgtcacaagcgtacaataatcttttccatcgatgatctccaggtcaccggattcatttggctctactaccttgatctgatccaccttatatgcaagaatctcgtctaatacatgaagataaaattcatccccgatctctaacttgtccaagtctgtaaataataccgcactcggaagtcccctgtgtcctgtcaacacacagtgcgtactcactccgccaagcggatacgaagactgctccatatgaccgacacccttggaaaggacatcctgactcgttccgttatagattggaagattcacatcaatcttcggaatcgtaatataccctaacgattcaccgatattcagaagatctgcataactctctccctgctcattattttcattttcatcatccactgatacaacattgctaagctgctcattatatttcttcgctgcttccttcattgcatcaatcttctcttcgtccatttcttctacatttgtctcataatctttcacaacctgactggcatgccgctgcgcaaccatgttactgataaatggatacgatgcgattcccaatcccgttatgaatataataacacaaaatataacccgaatctttttcatctgactcttccccaaaaataaatcactgcccgacacgttactgttcacagcagcgtaaaatctactttaggagagaacagattcttctgccctctcctatttatatagcattatgaaattaaaagtttatagcaattgttctgatttcttacgcgtcttttcttctacctttcagaagtacaaatgctgctcctgccatcagtgcaaaacctgcgatggagaagagaactgttcccataccacctgttattgggagagtgaaacctttcttgttgatgatagtttctgtgtgagtacctgttgaagtatctgatccttctttaaattctgtctttgtaatctcattttttacaagagtcttaacaccattttcatcagttacccactctgtctttgtagttgttgtgtaaacaatatttaattcaacttttactggttcttttaatagattatagttcttgtttgtttttgtctctacaagataatatgttccatttgcaagaccggactgtgacacttcaccgttttcatctgtttttaaaggatctgtattgatttttaaccaatatttctcactgtcaagtccaacattctttgctttagcacctgttattgcgtttatagtttcttttgaaacctctttataaagatcaaattcaacatcttgtaatggggtaccatctgctttttcagcttttttcagaatctgaagtttgaatgtataaacaactgcgctatcttctatagaatctttgcctggttttatatctggattttcaggcctgttcgggttatctttatcatcctgtcccggaagaatcttgttagaatactcaagttttgctgtattctggttaccatttattgtagtaactgcaccaccaagaagctctgcattatatgtaactacaatctgctttcctgcatatgatgccatattttctgtagtaaaagtaattttaaatccatgatctccttcttttgctacagaatatgcatttaaatctacatctgaaccttcacactgtaaacttacttctttatcatcaagatttgtcggtgtatctgttaatgtaaattcttttaaatttgtaatattggatggaacatcaatggtgatcttatatggaaccatgtctcctacattatagtcagcatcctgtttccaattatctttatctctttcttttacctgttttgtcatatcaggcttttcattctttacagtgattataatgttattctctgtcttaccatcataaacaatctttccatctgctgttactgtaaactcatatacagtagcaccatccataatataaccattattagttccacggtcagtctcgataaatctgtatttgccctgtgaaagaccctctacagtaattcttccatctttatctgttttaagagttaaatcatcacctgtattctcattctttgttacattaacccagcttgatccattctgtttctgaagtataaatgtaacgccttcaagctttgttccatcttttcccgttttctctaatgttactccaccataagttgtcttatttttaggatatacatgaacatcgtataaccaattatctccgtcttttgttgtcattggtacggatacgataaatggtttaactggtgttgtaaccttatccggtgttgttgtctcaacaactacatagaaaccaagagcaagattgtcaaactttgcaatacctgcattatctgttttaacttctgattttgtttctaaaacttttgaagcattaatttctccatctgtcagatagtcatccactgacggaagactttccggattagcattataatactttgctaagtcatctatatctgccaccttataaatcgtaaaccccgctccttcaagagcttttgcatcacttgggaccttgtttacatctgttatttctcctgtgccagcttctccacccgattcattatattcatatttatgaattgtaatagatcctgtttttgttgtgtcaattgttgcaggtgtagttgtactagtttctgcaaatgctgtcactgtcatagttgacagtaccattgctgcacttaacacgcctgccagcatttttctaaattttcccatactttccttcctctctttcactttatcgtgttattatttctttttattgttgcgtctaggagatgttaccctcctttctgcgtttttgtaatctatacatgaagagtcctacccctgcaagggcaatccccccaagtatcacaatgtaccttccatatcctcctgtggctggaagattgaatcttgcctgattagaaatcgtaatagaaatggtattatccactacctcacactctttattatcaatcagactctttccattcctgttgatcactataataaccggatctttcaacaaactatgattctttgctgcctttgtctccgtcagacgataggttccatctgtcagatccttgaattctgcaattcctaaaggagaatcactgtcacctccacttgttgttactgtttgggtttcgaaactattatcaacaacaagatttcctgtcgatgtattttccttcatcttttccagtttaaacttagcaccattcagtggttccttagttgatgcatcctgttttgtgatcttaatatttgtcttaggactgtaagtatttgttattttaaaggattgtgttttactttccggagtctctgtggaaatctttgaacaatctacattctcactgtatgttactttgtacttatcgttcaggtatccgtcaccttcaatcaccgtctcacttccatcgtctcctgatacctctacaactcgatagatatatggaacctttggatctgctgtataattcacatattgatccagatctttgaatgaataactccactttccgtcatatccttgagaaagtgttattgtttcgtttgttccatcgtatttaactgtttcccatgttgttcctttatccttgcttctctgaagccggatcttaattgaatctggaagtgtgatactctctgtattttcccacacttttgtaagattaagattgattgtaggttttaacgtattcttgaaagtaataattgtagcatccgatgatgtatctggattttttattccatcccctttcatatcactggaagcaattaccttaccggcaacaactttcgtgactggatcatatcctgcatcgaatgaattattattatttacaattacactttccaatgtggaaccatctgaactattaatctcgctgattctataatctgttcctgccggaattccgtcaatagtcaccgactctccagctttgattgtatattcctttacaatcttattagattccaacgagagctctgcaacattactgaactctacacggaatgtatagtccccctccaatgtattcgatccttctgcagtttctttccgaatctctatttttccggtttttactttattgacaaatgttgctttcagctttgtcatagttgtctgattatcaggagctacatatgatctgaatacaattgtattttcattatttgtctgaccatcttgattcttcgcatatccagtagaaggatatccgctgttagctatttctacactattattttgaccagacttatgttcttctttacgaccatcccgaatggtattgcctttaacattttggactgatggaataggattttcatttaccaccgtatctccgtttcccattgttgacacagcctgtccattttcataaagtgtccatgtcgtatcaaataccgatgaattcacatcttccgatacagcaatgtagcttcctcgtctaaactgatcactaaatgttgctgtctctccatctgccaaggcgaacattccgtcactgccaattctgtacagttttgatgagccatcatttttagataatgtatactgtgctcctttcggatatttcaacgttccacttgtcgcagaaccataatccggaatatcctgttgttgtgttacaaatccagttttggctgctgctacaacggaaggaatgaatataaaatcatccaagtaaatatctctctcgaaattataattaaatttgatattttttatcttggaataatcaaatgtattatctccctgtagtttactcagatcaacctgaatcgtattccattgattatgtacaagactactgtttccgtaagtctttcctgaaagataacctcctatttttttttcattatcatcttccagttccagataggtgcttgtaagtcccggaatgtcctgatagtcatagtacatcttgaattgcaagaatgcatttgtatcagatgcatcaaatgtttctccatttgctggtcgtatgattccaaatcttttgttaatatgctctccttccgcatcgtcactttttgccttccagtgaaccacatttgtctgaccagccttcttatctatagtttcaaatgtattttgtggaaacgtttttgataacttttctgctgaaaaactatcattataagttttaggctgtttttcatcggaagattgtgcttcttttgttccataatgtgttgcctgattttgaatcgtgaatgggaatacgttagcatcttcaaataatgatgtcgggaataaatctgtattcacatctgtcgtatcaactttcttttccacagcgaattcattttcatccgggaagttgaaggatactttcatatttgattcccacataccacgttccatataaaacatggttaatgtatgttcatcagaatttgaacctttaattttaaatttactccgagtgtcattaccttctgttggagatccttgacttacctttgtcttgctaactgttgctattttgtttttaaagtcaatctgacctgttacttttccatgtgctccaccaacatccagtgcaagatttccatccacatacacccaaacatcatcatcaccggagaagttgaatttaattggatgttcttttccatctgttcctactacagttccattgtctgtcaggcggaatttaaattctaacttcgtaccaaatccatagttatatttacttgccttgcatggagttgatgtttcattaaatgggaaaaaaccatgcgttcttttatcactactggcactatctacattttttgcccagtcttgtttcccccctacattctccagataataattccctgattctgtatcagtacgcattgccagtgttgtatctgcactatcaaagtaccagtattcaacgccgttatcagctttttctccttcatcgttcagtttttgttttgtaaaaggaaacgaaacattcttatatatctttgcaagcgctgtatgcttactattatctcctgtaagaaattcctcattaaaatgcggttctaatactttgttatctgaagtcattagattgttttcatttaatgcatttgctaccaatccttgcgctgcggaataaacgtactcgtcttttctaactccatttgcattcaatgctgagttgttcgtagacataaaaccattttttttatcttcatatccataaagttctaatttatcggcgattttagaaaaaggattatcccaacaatctggctgaaaatgacctgtataaatcggtatacttacttctttctttttatagtaatcactgagtgcttggtcaaactgacgaaaggtaacataagttctttgtgaagatgcttggtaatcatcataattatctcggtttttcccgttcaattcataatctgtataataatcataaaatgttgaatttacatataaagtactcgcatttcttgtaagttcactttctttaatatctacaacatctttactattatgttgttctgcttctttttcaggatctcttacggtataaacctcatcccaatatccaccacgatttccatctttgtaaataacatcatcacttgaatcaccgtaataacacggattcatcaaaccacctggaatcgttactaaatctgtcacatcaccattttgtgatacatttgcgttcttgagatcataagctgcaaatcttactttattgtatccatccggaagattcgccttatatacatctggatagccttctttattatctaattccatttccccagtttttacacccgttccgtttgtagcataataataaacattcgtcgtacctggatatggaattccttgaccatttttcgcaccatctgtatctttataggacagtttggataatgtagcgtcgtaataaactgttactgcacctgctattccccaagaagaattatctgcagtactattgtagttatagcaatacattgagtcactgtatacaaagtgttcagtgacatctgcttcttcatttccctgtccatagaaattcgagtaagaatcacctaatgtttttccatttgatgtacttacaaaacgaatgtaggagcacgcctcatctggaattgttactgaaaattttgtgttttcagtaccggctgtcatcttgattcgttttacttctttcagagttcctgaactatccttttcatagaatactgctgttacaccaccggaaagatcttctgttcctttgttgtagaaaagaatgttttttccagcgaagtaggtgtggtcgttaggattgaagggattgtaaacttctgatttcccatcagaataaaaaattcttccatcaatttcagctactgttctccaattttgaaaaacttctttataatcttgttgttgacctcttgacttagctagaaattgaaatttatcatatccaccatattggggatacgacataactactttatatacctgaagattattgtatgtctctccagtatttaccatctcttggcagatccatctattctcgggatttgattcgcatccctttgcttctattgtatattccttatccgtccaatccttcggtgctgcaaagtaaattgtcactccggtctctgcacttgcagccattacttgtgattcattttctccgtccgcatcctcatccgcagcttcgctttctggttgacttactgcttgaccttcccaggcaactgtcgcttcattctctttgctctcgtctgctctcttagctgcttctgtgatatcctgctcctcttcgaatgcctttgcctcaaccagcactttctttgtatagcttgcttcatctgtacgatactgaagctgcatatcaaagttgattgctattgcatctgccggcattgtgatctgcagatatttagaagtaactgttccattatcgtccttgtcgttcttccactctgctgttggacttgcctttgttccattattaagagtcactgaatctttcaatgtctcatcgattgttttctgtgtgtttttatctgtaagctgatcgcttgtcagaagattgactgcatctatatctgttgccgcagatccgtcctcgttttttagatatacattcagacagactgattgcgagcactgcccctgcgcagtcacatgaattgtctgtgtaacattctgttccacagtttgttcagaatctttagaaatgttaatttttatccgatcttgttcgtcactgctctctcctgttgcaaatacagtatttcctgttaatgctgttccgagtaccattgtcactacaagtatcagactaactctctgttttgcctttcctctcatttttcgaactccatcccttttctataaaccgataatatacttctgtctctcctctgctgtctatcggcattctcttgtctttgtttcatacactatattaacataactttccaatttaatgaatattaaattttcatgatttataacacaatttcaagatttataacacaatttcaagatttataacacaatttcaagaagttacgtgttttatccccaaaaaataacccagaatcaactgataaattttctcttttatcaattaattctggattatttcatagtaatagcgtaaactattcacagtttacgtaatagtaacgcctgttgagtatttgtatttttatagaagtgcaatgtagcacttttagtttttgcaagaaaaaaacagcgctttcgcactgcttctcattcctgtctatattccatgtaccttcaaaactacatacagctaaaaccaacatcatcatccaaacctatcactgctttggttatgccctcgacctattagtaacagtcagctccatgtgttaccacacttccacctctgccctatctacctcgtcgtcttcaaggggtcttactaacttgacgttatgagatatctcatcttgaggggggcttcacgcttagatgccttcagcgtttatcccttcccggcttggctactctgctatgcctttggtaagacaacagatacaccagcggccagtccatcccggtcctctcgtactaaggacagctcctctcaaatatcttacgcccacgccggatagggaccgaactgtctcacgacgttctgaacccagctcgcgtaccgctttaatgggcgaacagcccaacccttgggacctacttcagccccaggatgcgatgagccgacatcgaggtgccaaaccactccgtcgatgtgaactcttgggagtgataagcctgttatccccagggtagcttttatccgttgagcgatggcaatcccactttataccaccggatcactaagtcctactttcgtacctgctccacccgtcggtgtcgcagtcaagctcccttctgcctttgcactcttcgaatggtttccaaccattctgagggaacctttgagcgcctccgataccctttcggaggcgaccgccccagtcaaactccccacctgacattgtcccccagccggatcacggctgctggttagaaacccagtactgcaagggtggtatcccaacattggctccatggcaactggcgttaccatttcctagcctcccacctatcctgtacatgcaataccgaatcccagtatcaagctggagtaaagctccatggggtctttccgtcctggcgcaggtaaccagcatcttcactggtatttcaatttcaccgggtgcattgttgagacagtgcccaaatcattacgcctttcgtgcgggtcggaacttacccgacaaggaatttcgctaccttaggaccgttatagttacggccgccgtttactggggcttaagttcaaagcttcgcttgcgctaacctctccccttaaccttccagcaccgggcaggcgtcagcccatatacctcacctttcggttttgcatagacctgtgtttttgctaaacagttgcttgggccaattctctgcggccatcttactggcactccttctcccgaagttacggagtcattttgccgagttccttaacaatgcttctcccgtcggccttaggattctctcctcatccacctgtgtcggtttacggtacgggtatcctgcaaacaatagcggcttttcttgacagtcagctcacgtgcttccctacttattttcagtccacatcacgtcttcagattgaagagcggatttgccaactcttctcctacctcgcttgtaccggtttttccattcccggctcacgctctctgcctgtgtccccacagttctgttacaggatagtacaggaatttcaacctgttatccatcgactacgtctttcgacctcgccttaggccccgacttacccagagcagatcagctttactctggaaaccttagatattcggccggaaggattcccaccttcctctcgctactcattccggcattctctcttcttaaaagtccacagctcctttcggtactgcttcgtccctttaagaatgctcctctaccaattgaattctcaattccaaagcttcggcagtgtgttttagccccggacattttcggcgcaggacctctcgactagtgagctattacgcactctttgaatgaatggctgcttctgagccaacatcctagttgtcttcgaaatcccacatccttttccacttaacacacattttggggccttagctgttggtctgggctctttcccttttgaccacccaacttatctcggatcgtctgactcccatacatcatctacacggcattcggagtttgatatcccttagtaagctttgacgcccccttaggaattcagtgctctacctccgcaagactcgtatgaggctagccctaaagctatttcgaggagaaccagctatctccgggttcgattggaatttctcccctatccacacctcatccccacccttttcaacggatgtgggttcggtcctccattgccttttacggcaacttcaacctggacatggatagatcacccggtttcgggtctactccgactgactatgcgccctattcagacttggtttcccttcggctccggacctttagtccttaacctcgccagccagcgtaactcgccggaccgttctacaaaaagtacgcggttgagcatataaagctcttccacagcttgtaaacatatggtttcaggttctttttcactcccctcccggggtccttttcacctttccttcacagtactatgcgctatcggtcactaagtagtatttagccttacggggtggtccccgcatcttcccacaaggttccacgtgtctcgtggtactctggatcccgccatgtcaactcgtctttcgcttacggggctttcaccctctctggccggctttcccaaaaccgttctgctaaactcgttgaatcaattccgcggtccgaaccccagcatgcacgcacgctggtttgggctcttccgttttcgctcgccgctactcacagaatcacatgttgttttctcttcctccggctacttagatgtttcagttcaccgggttcccttccttaagttatgtattggcttaaggatacttgaggtttgctcaagtaggtttccccattcagaaatctccggatcaaaagatatttgctcctccccgaagcttttcgcagcttatcacgtctttcatcggctcttagtgccaaggcatccaccatacgctcttatcagcataaccaactcgacctcatcccacgggaatgggataacgtccacacatacatagcgttgtatgcgttggtgatagtcaatttattttaagtctgttttcttcagactgtaagttaatgttgttaacattacctcggatgtcttgattagatatttatctaaatctattgatttttactatatgtagttttcaaggtacataagatgaagttcttattcagttcttcatccgactgatattttcatcagtcattacatacacaaatctctttgtatatctaatcactggtgaaaccagctatcataacagcactgccctgctgattgggttggcggtgataagttgttgctcatctttgcctgtatctatatgttcaacttcggcagcgtctctgccttagtttctttcttttaatttggcggccacctactctcccacaccgtctccagtgcagtaccatcggccgcttaggtctttaccatcgtgttcgggatgggaacgggtgttacccctaagcgcatcgccaccaaaaggtttaggttacttgataacccaacaatagacaacagtaaaaactctctacttttttcttccttagaaaggaggtgatccagccgcaccttccgatacggctaccttgttacgacttcaccccagttatcggtcccaccttcggcagctccctccttacggttgggtcactgacttcgggcgttactgactcccatggtgtgacgggcggtgtgtacaagacccgggaacgtattcaccgcgacattctgattcgcgattactagcgattccagcttcatgtagtcgagttgcagactacaatccgaactgagacgttatttttgggatttgctcgacctcgcggttctgcctccctttgtttacgccattgtagcacgtgtgtagccctgctcataaggggcatgatgatttgacgtcatccccaccttcctccaggttatccctggcagtctctctagagtgcccggccaaaccgctggctactaaagataggggttgcgctcgttgcgggacttaacccaacatctcacgacacgagctgacgacaaccatgcaccacctgtcatccctgtcccgaaggaaaggcaacattacttgccggtcagggagatgtcaagagcaggtaaggttcttcgcgttgcttcgaattaaaccacatgctccaccgcttgtgcgggtccccgtcaattcctttgagtttcattcttgcgaacgtactccccaggtggactacttattgcgtttgctgcggcaccgaacagctttgctgcccaacacctagtagtcatcgtttacggcgtggactaccagggtatctaatcctgtttgctccccacgctttcgagcctcaacgtcagttaccgtccagtaagccgccttcgccactggtgttcctcctaatatctacgcatttcaccgctacactaggaattccgcttacctctccggtactctagattgacagtttccaatgcagtcccggggttgagccccgggttttcacatcagacttgccactccgtctacgctccctttacacccagtaaatccggataacgcttgcaccatacgtattaccgcggctgctggcacgtatttagccggtgcttcttagtcaggtaccgtcattttcttccctgctgatagagctttacataccgaaatacttcatcgctcacgcggcgtcgctgcatcagggtttcccccattgtgcaatattccccactgctgcctcccgtaggagtttgggccgtgtctcagtcccaatgtggccggtcaccctctcaggtcggctactgatcgtcggcttggtaggccgttaccccaccaactacctaatcagacgcgggtccatctcataccaccggagtttttacccctgcaccatgcggtgctgtggtcttatgcggtattagcagtcatttctaactgttatccccctgtatgaggcaggttacccacgcgttactcacccgtccgccactcagtcaccaagatcttcatccgaagaatcaaatcaaggtgcttcgttcgacttgcatgtgttaagcacgccgccagcgttcatcctgagccaggatcaaactctcgttaaaagtgtttgtatccagttcagaatcaactaactagctaattcttccctttttactgttgttttggtttgttaaaaaccgttcttaaaaatcttctcttaaagaaattttcaagggttgttgttgtctattgttcagttatcaaggttctttgtttgtgtcgttcttttcaagcgacagcttttatattttatcaaaagcctttgtctttgtcaagaacttttttatttttcttttgctgtttgtgagtcactcatccacttctcttcgacagctcatttatgttatcacattcaaacttttctgtcaaccactttttaacaattcttataagtttttattagttcttcttataagctgctcttttgaactttctttcctcagggactgtccgcctccgcgccttcctctaaagtaagctttcgttctatagttttcagtgccgttctcagcgacgaatgttatcttaacacagccgtttttaattgtcaatgttttttatatatttcatgcaattcagaatattctgaaaattagcatctgcgtttccaaacactagcaggtgttgcaagcttgcttgcactaagctggtagggttgggaaacatagggcgaatgcccttaaccgaaaggacgtcagttctttcggttgttgcagatgcgtaaactgcgttcccaaacactaacagctattgcaagcttgcttgcagtaagctgataggggtggggaacatagggcgaatgcccttaaccgaaaggacgtcagttctttcggttgttgcaaatgcgtaaactgcgttcccaaatgctacgaatattgcatgcttacttatttgtcacaaacagcatactcagtaatgcaattccgaccacctcaaccactgctccgattccattgatcatgctcattctcttctttggcaatatttttccaagaaatgcaaagagcactgctcccaccccactgccaagtgtatttccgattaaatctgtaatatcgcttacgccaatagagaatatccactgtactgtctcaaatgtcaggctcacaaaaaatgatgctccaatccccaaccaccattttcttttacccagaaatgcagtgaagtaaactcctgccggaacaaatatcagtatattgtatataacctctttcatatgtgttatatacgcaacacttgtttcgtaatgaaatgggattagatttagttgtcttaaatgtgggatttcttctatagtaaatgcaaacttaaacagcacaagccatgtcagtaagaagagatatgctacaaatacaatatatgatatcattttacttctattattttcccatcgtttttctattttcattttttctccaataccttccttgaactatcctcttttataaaagaataatagcaggcttttcttaatcaaagcctgctattattcttaagtattcttgaacttcttgtaatccagaagaatgttgctacaaagataataccttttacaatggatgtcgatgaaactgcacaccagattccattaagtccgagtgctgttctgcaaaggagaattgctaatggaattctcgctcctgtaaatataattgaaatcacactgcacagatgtgtctttccaagtccggacaatgccccaaccgtcataagctctacgcacataaatgcttcactgagtcctacgattataaggtaatctactgcgatttcaattgctgttgcttcatggaaaaaaattcttgcgattggttttggaacaaatacaaatattgttgtaattatcaatccccaaataccaactgtccataaagatgctctgtatcctttcttgacacgatccatcttgttggctccatagttctgtccaacaaatgcattcagcgccgcagcgaatccatccgccgtattccatgagatcgattcaatctgaccaccgactctctgtactgcaactgcctcagcaccaaagacggataccatacgtgcaagtaccattgagattacacaataagccattccctgaagtgctgtcggaattccgatcttgcagattccacttacatattccatcggaattcttgcaaacagacgaattccttttaatacattatccttcttctgcacaaagattccgataatcatcacactcattacaattccctgcgctgttacagtcgcaattgctgcacctgccacacccaattcaggaagtggccccggtccaagaatcagtaccggatccaggatcatattaattaccagcccgatcaggttcgcaataaatggagtctttgaatctccctgtgcagtataaatacctgtcaatgtaaatgtcagaaatgaaaatacgatcaaaccgcaggcaattcttgtataagaaagtgcagccgcaattgcttctgcatcatccaaatgaaagaagccgatcaatcgatgtaaaaacagcaatacaattgccgcatatactaatcccatcaatgtagctaactgtactgcggtctgtgcatatttattcgcctcgtctctatttccttttccgatgcattgcgctacttgaacttgtccgcccattcgagccatggatgccagtccctgtgacagccaggtgtacattcctccgacaccaactccggcaactgccttcgaaccaagcagaccgatccatgccatatctgtaagattatacaatgtccctaaaaatgacgatgccataatcggtatcgccaactttgtcaaggtctttaaaataggaccctttgttaaatttccttccatatcttccccacataccataatttctactatcaatttgttctactgtgcattcaatagcatctctatagacagactactacataatggtattttttgcaatcccttcttgtgatggcaaattccaaaacgaaaaacggagttactgttcactcccgtgtcaatcactccgctgattgacacagtaacaaaacggagaaatcctggtcggggatttctccgtttttcctatattatagagatgatacgatttactcgattgcttctgtctcgattacgaatttcacgtttccttccattccgctgtcttttccactgaatgttgtataagtacaatcatccgatgtaagtgcatcgaaacggtcaagtacatcaccaagttcgtcttctactgtgctctttaatttgcttgttccttcacggtcgaacttctccataccgtctgcgagttctcttgctcctgactgaagagttgctgcaccttcacgaagggctgcgctgttcagtgaaagttttgccgctccggatgacatctggcttcccagtgtatttagtccgcttgccagctggtttgttccgctctgaagtgtctgaactcctgctaccagtgttgaactgttagctttcagtttgttggctcctgctaaaagtgcgtcattatttgcactcaactgtgagaatccaccgttcagttcaagaatacccgtaactgctgccgggaactgtgcctgtacagatttgtttaactcaccaaggttagatgaaaatgttccgattgctatatttaatccctgcattcctgcatccagctgatctacagattctgataactgtccgattgcttccgccggaagtttatccttcatacttgtgattgtctgaagtttctcctgcattgccggaagctgagctgtcagtgtctgtgctgtctgctgaaatgttttcattgacacactgattgctcccatctcctgctggatcgctgttgtatcaattgttggaattgtcacactaacttcgcttgccttctcgagtccgctcaatccgtctgccgcgctctttgctgcatttaatttatcaattgctgcctgaagatccgcttttgcagtctcgtctgttgtctgatctttcttcgcctgtaattcactgactgcagaatcaattgttgctttgctgtttgctgctgcattttttgctgtatcaaccttatcattataatctctgatctttgcattcagatcatctactgcactctgacaagttgtgtccaaagtagcaagctgctggttaatcattccaagctgctgactcagacttgtgaggttagctgcaatattctgaaccggtgttgcaattccatcattcagcgctgttccaagcttctctgtctgattgatcatttcagttcctgtcgccaacatatttcctacctgccccaaaagtgcctgaacctctttgcttccaagtgctgctttcagctgtgctgttcccgctgccagctggccggctgctacctgaatatcttctgtcgctgctccttctccgtcaatcgctgcattcagctgactgatcgctccctgtactgttttcagtccgctgctgagctggctcagtttcgcggcacctgctgccagctgctgttcaccgccaatataagctgtaactccgtcagccagtgcatttgttccgtctgtataatcctgcacgcctttgacaactttattgacaccattcacatactctgtcacgcttccgttcagttctccattgcttccaaggtacttctgaattgcatcattcaaagtatccgcaccttctgtatagctgttgacaccgtctgcaagtgttccggctccgtctgcaagtgtgtcagacccacttactaactgaagtgctgcatcttccagttcatctaaggaactcttcagcgaatcaacatctacgatattatcaaaatcaatgtcatcaagaagatcggtaagtgccactgtaaatgtagaagacattgtgaaatctgtcacatcagcttccacgcagagactttccgggattgtcagatcttctgttttgctttcgtccagattcaaactttctttcatgccaggcattccgaatccgactacgatattcttgcttccatcagaaataacttttccgttatcaatcgtaacattgctaaatgtttcattcggaaggatcattcccgtcatcatgacaaatggtgtgtaaacttcttcttgttttccatctacgctgactgttttcttctctttatttgcataatccacctgaatcttcagatgtccgctttttcctttcagatctgccggtttgatttcttttccgtccagatagtaagtaagctttacggaaaccggaagattctgatctgttgttccctgataataaatatcttcaccgtctgtattccatgtcaatgtatctccggatgctttgaatgtttcatcaccttttacattcttaatatctttcagagtacttgcatctgtcaggcttcctgatacactgcctgaattcttcagccagttagatactgttacgtcatcaattgttcctgttgcgtctgcatttacataaactgtctcttccttataaactgcatctgcgtcagaacttgttcctgcggcaaagaccggcacagcgcccatcatcactgacattccaacggcaagagaagttgtgagtccacgtttgatttttctgtttttgttcatgattcttacatcctttctacttttttccaccgaggaatccgatggacgtcttacatattactttgtcaaatatcataaacatcgccggcaatatcaggattacaacaaccatactgataatcgcgcctcgcgcaagcaaagtgcaaatagaaccgatcatttcaacctgtgagtagcaggctactccaaatgttgccgcgaagaaacttaatccgctgctgataattgacggcatactggttttatgggcaatactgattgcttccatcttatctcgtccacgctgacgctctttctgatagcgggtcgtcattagaattgcataatctacagttgctcctaactgaattgctccaattactatacttgcaacaaatggaaggcttgttccctgataaaacgggattgccatattaaccataattgcaaattcaataactgccaccaatatgattggcagtgatattgatttgaagataatcataataatgataaatatcgctgcaattgaaagtgtatttacatttaccagatccacattggttacatcctccaagtctttcatcaaaggagcttctccaattaccatcgcatttttatcataagattttacaatcttatcgatcgatgcaatctgtgtattgacttcctctgtcgctgattcatattccgagcatacaaatgcaagctcgtaatcatcgctttgcagcatttctttgatatcatttggtatcatagagtccggcaccgccggtccaatcagcgaattcatactgatcgtccatttgacacccttcacagaatcaatctcatcgaacattttcgacttctgttttgcatccatacttctatctaacataaccatatgaatattactcatatcgaagtctttcttaagttctgcattcgccacattactgtccagtgtggacgggagtgaatctgcaatgttgtagtaaatctttgtgtgattatttccataaatagccgggaataaaagtaccaggaaaacaacgatccatactttatagtgctttgtaataaaagctgatggcttatccatgttgctgagcaacagtttatgttttgtcttctcaattggtttatcaaatacaagaaccaaagaaggtaaaactgttacgcaacagatcacaccgatcaatacgccttttgccataacgataccaagatctcggccaagtgcaaatgtcataacacacaacgctacgaatccggctactgtcgtaacagagcttcctgccacagacttaaatgtattggaaatcgcatgtcccatggcacgttctttctctcccggaaaacgcttcttgttttcctcgtagctgttcaagaggaaaatggaataatccattgtcacacccagctgcaataccgcagtcaatgcctttgtgatatacgaagtctctccaaagaaaatgttgcttccaagattgtagagaatcgcaagcccaatactgatcagaaataaaatcggtactacgaaagatccgcttgtcagttcaagtacgaccagacttaaaagtgctgcaatcaccacataaaccggaagttctttaagtgccagattcttaatatctgtaacaactcctgtcataccgctgataaagcactgatcattcgccagcttcctcatctgtccgacagcatccatagcttcatcagaagatgttgtattatcaaacaatacaagcatcatcgtggcatcgcctttgaaaaacgcctcctttaaatcctttgggatcatctccaccggaagactgatatcagctacatcgtcataccagagtacatcttttacatgcgatacttcactgaactgatcttcaagcttctgaacatccttcatgtccatgttctctaccacaaccatggagaacgcgcccattccatactcatccaccagaatatcctgaccctttactgtctccagatgctccggcagataactgagcaaatcatagtttacacgtgtctttgccatcccgatgaccgacgggataattagaagaaatccgatgatcaacatcagaactctgtgtttggcaatccatttgccaactttaaccatttgtatcatctcctatactgtctcactactcaagtctcttatagtatagctcgaaatgaccattagtcaatatttttttgttaaaaaatgaaaaatagtcatttttattgacttttgggaattttgtgccatactagtaaaaagacaataggaatttttcacagaatgtatttttatgaaaacctcttattggcaaagtttgtattatatattacactcactaaagacacacaaaggaggtcattgagattatgggaaaagtagatgataataaaaagctgaaaatgaatacactgctccagactgcatttgacctgttcaccggaaaaggctttgccaaaacaactgtatccgacatcgtgaatcaggccggtctggcaaaggggacattctatctttatttcaaagacaagtatgatttaagagataaattgatcgcatacaaagcctgtcagctttttgatgatgcacacaagcagcttgaaggcactgagattaattctttagaagaagagattctttttttaacagactatattattgaccgtttccagaaacagcagtccttgttaaaatttttgtcaaagaatctctcctggggagttttccaggatgctgtcggaacaggttctgtagtgtccaggcaattttatgatcactacagaaattcacttgtaaaatataacgtaaactgtgagaatccggatctcttactttttacactaattgaattgatcagttcaacaagttacaactgtatccttcatgagaaacctgtttctatggaagagtacaaaccttatcttcataaatcactcaagaaggtctatgaagtgtttgtaagcgttcagggttaagtttattttatttaatttatttttcttttaatgtttgaacataattttgacacattttctgtctatactaaaactcagatagttgataaacaactatctcccccctcataaagtaatggcatcccggtgtgccgggatgtcgactttactctcattcctttagataataaaaagaagacccgattgccgatctgttgaaacagtgaggtgctcgggtcttactttttgtgttttcatatgatgtcgtacaggattcctttatatataacaccacctatattctggcagcatctaagttatcactgcaacgcgaaagctcgctaacctttcggctaacgggcttcgttgtgtttatagttatctaaaggaatgagagtaaagtgttgacactttcctgtgtcacaactttatgaggggggaagataattgattttctcttatcaactatcttgatattagtatatccggaaaatgtgtcaaaagtatgagtgctttcttaaagaatacgaaaaaatataaacagattatgaaaaaatataaactaataatttatttttctacgttcttccatccactcgagaagatcttcatatacctgctcccgatctgtctcgttaagcagttcatgacgatcaccggcatacagtcttagactgatgtcctggattccggccgctttgtatttctcataaaccttccttacgccttttccgaatcctccaaccggatcttcggcaccggctgcgaaaaggattggaagctgcttcggaatcatatagatactttcttttttctccattataagcatcccggtaaacatgctataatacgcgttcactgtaaagacaaaggagcacagtggatctgaaatatatttttccagatgttcttcatcactggttacccagtccgcgcgtgtctttggattcttgaatttcctattataggcaccgactgccattctatccaccagtttacttttataatgccagccacggaacatcgctagtgtcctacacaatcttcttccaaactgaagtgtcgctctctgctgatctgctacaactccgataaacattgctcccgccagcccatttccatacatctgtacatactggcgcaaaagacttgagcccatgctatgtcctaacataaagtaaggtacatccggatatttcttcatcgtccgctgacgaagtgtatgcatatctccgatcacgcatgcatttccatatttttcgttaaaaaatccatactccgacttgctctgcacagattttccatgtcctaaatgatcgtttccaacgacataatatccatgactacacatgaattctgcaaattcatcgtatctcttaatatattccaccattccatggcttaactgcaggacagctttcacttctccttccggtttccactcaatcgtgtggatctccgtattgccatcctttgaagggaaataaaactcatctctcatcgttcattcactacctgtcatctaatttgatataatcacgatatggtgcaagcggcttataagccggacgtatgatcttatctacattcttcaactcttccagtctgtgtgcactccatccaacgatacgtgctgccgcaaaaattggagtatataatgccggtggaagatcaagcatgctataaacaagtccactgtagaaatctacgttcgcattaacacctttatacatcttacgtctctcgctaatgatctccggtgccatcttctctactttctcatacagtacatattctgcctcgtggcccttttcatatgcaagctgctttacaaacttcttgaagatctccgctcttgggtcggatacagaataaatcgcatgtcccattccatagatcagacctctcttatcaaacgctctcttctccagcagtgcctcaaggtaagctctgatctgatcatcatcctgccagtctgtcagctgcgtcttcatatcttcaaacatctgtgttacttttacgttcgcaccaccatgttttggtcctttcaaggacgccatagctgctgcaattgtagaataagtatctgttcctgaagatgtaacaacatgcgttgtaaatgttgagttgttaccaccgccgtgatccatatgaagaacaagagccatatcaaggatcttcgcctcaagttctgtatactgacgatcttctctgagcatcatcagaatattctctgccatagacagttctttcttcggtgcataaatatacaggtcttcacccattctataattgtaagcaagatagctgtaaaccataagcattgggaactggctgatcaggttcagactctgacgcagtacattcggaatgcttgtatcatccgctttgtcatcgtaagaataaagctgaagaatacttcttgtaatactgttcatcatatcacggctcggagccttcatgatcacgtcacgtacaaaattcggtggaagcatccggcggtcagctatcatatccttaaaattctcaagttccttctgattcggaagttccccgaaaagaagcagatatgcaatctcctcaaatccaaaatgtttcgcctcaaggaatccgcttacaagatctttaatattgtaacctctgtaataaagattacctgcacacggtacggatacaccgtctacaatctttgttgcacacacatcggatatatttgtcaatccggcaagtacacctttaccgttcagatctcgaagtcctctttttacttcgtatttggtatagagttctttgtcaattgcattgttcgtttcacatttcagagcaagttcttcaatctccggagtgatgtcaaaaaatatgctgttaatatctttggccatgggctcttcctccttctcttgtttcttctaatgtcttttatcttttaattatactagatatccgtctagtaaacaattaactgaatattaaatctttatgaatcaaaaagtgaagaagaataaagttgctgtccactacatttttgtaaacagcaactttgtaaattcctttaatattattttatctgcaatcataaagaaaatctgccagctttgcaaattcttccagcgtaagggcttcccctcgaatagatgcacctcttccgagtgcttcaatcgctgcctcgatttcttccttcgtgtagtcaagttctgccgaattcttcagtccatttgccaaagtctttcttctctggttaaaggaggcacggataatacggaacataagcttttcatcctttaccttcaccggtggttcttcataacgttccagacggattaccgcagatccaaccttcggacgaggcataaagcagtttggtggtacatttgccacaatatatggtttcgcataatattgcacagccaaagacagtgcaccatagtccttcgttcccggtcccacctgcatacggtctgcaacttctttctgaaccataactgtaatactcttgatcggaacatgattctcaaaaagtcccataatgatcggcgttgtaatgtaatatggcaggttggccacaaccttgatcggttttcctccattttcctcttctgcaagctttgcaatatctactttcaggacgtcattgttaataacacgggcattgtcataatctgaaagcgtatcttccagaatcggaatcagtgccttgtcaatctcaactgcaacaacttttctcgctgcacatgccagatactgtgtcatcgttccgattcctggtccgatttccaatacaaaatcatcttttgtaatctctgctgccgcaataattttgtccagtacatgtgtatcgatcagaaagttctgaccgaactttttctggaatacgaaattatatttctgtaatacttctatcgtattctgtggatttccaagtgttggttctttcatctcatctctccatttcttataattgatataaatcccttgcattcttctctgtctgttcgatcacctgctccgcagaaatgccttttaactctgcaatcgcttctacaacatatggcaggtacaaggatgaatttctctttcctctgaatggtgtcggtgccagatacgggcagtctgtctcaagaacaattgactccagtggaatttcttccacaatctcttttaacttctttgagttcttgaatgtcacaacaccgccgactccgatgtaatatcccatctttacatattctcgcgccatctcaaggctgtaagaataacagtgtatcacacctttgagtccttttccatgttctttcataatttccatcgtatcagctgccgcctcacggctatggatcatcacaggtttgttcatctctcgcgcaagatccagctgtctgatgaaccaatgtttctgcagatcatgcccttctttatcccaataataatcaagtccgatctcgccaaccgcaacgatcttttctttctttaataattctctcattcgagcgaaattctcttcattcagtgcaccgacttcgtccggatgtacacctactgatccatatataaatgaatatttctctgcgagttctactatcttatcccaagactctactgtcgccgctgcatccacaattgttccaacgccgcctgctgccatactgcttagtagctcatctctgtctgtgtcaaactgctcatcatcataatgcgcatgtgtatcaaatatcattttatttaccgcctgttttcaatatttctaatcttgtgctttattttaccacaaataattctttccgtcttcatataatacatccatcgccccaatgtccaaggttctcaagttccgcacaactaactaaatcagacatttcataagcagattttttcattcttataccttaacgtgttacattttatttcgttttaatactagcatgtgaaaatttaattagcaagataaaagcagcgaggtacaggtcattccccatatctcgctgcttttatctcattttatcatattcaattattgactaatgatttctatagtaattgatcagacatccgtcaagaatgatctcacgctctgcgtctgtcagatctcccagcttaaggttcagttctttgagttcatcacctacaacataagctttgatcacatccgctttctcttctactgcttttctcacattaggaacaaagatgtaatctccgttcttgaaggaaagtgcttcatgatcttcttctgtcaggaatgggagcattccccagttgatcaggttagaacggtaacgctttgttgcatactctgttgcgatgtttgcccatccgccaagtactttctgacaggaagctgcctgctcacgagcagatccgtctcctggttttactgcgaagattgtacttccgacaccaaggttacccttgccaacttccggatatgtctcgtggatcttatccatcaccggtttcagttctgcaagagcatctaccggacattcatctgcttcaattgctttctgagctttctgtacttcttttgcacgtccaacgtatgcaggatcttttcttgaaagagcgaactctgcaagtcccagtggattagaacggtaagaagatgtctctccggacggaatcagctcatctgttgttgtaacaggatcatggatctcagatacaaccttcacaagcaggttctgtggaagtgctgacattgccggccagtccttaatgtttggtccaaatttaatctcaacgcttggatcagcaacgcccttgctgtcaaatacacggtttgcataaatgttcttatcaaagtgatatttctgtcctttgtactctacatccattgccgttgccggtgttaagaatcccttgtttgctgctgttgctgcgatagaacgagcatccatcagtgctacagaagagatctgtccgttctgcagcttacttccttcacggttcgggaagtttcttgttgtatgacggatagagaatgcgttattcgccggagtatctcctgctccgaagcacggtccacagaatgctgtcttcacaacagttcctgcttccataagatctgcaattgcaccattcttaacaagttccatataaatcggtgtacttgccgggtaaacgctgaatgtaaattcatctgctccgatgttctttcctttgatgatatctgcagctgcacagatattttcaaatccaccacctgcacatcctgcgatgattccctgctctacatagaacttaccgtttctgatcttatcctgcagagagtaatcaactgcaccgtcaagacttacaagtgctttctgctctacatcatgaaggatgtctgccagatttgcgttcagttcatcaattgtataaacattgcttgggtggaacggcattgcgatcattggcttgatctcgcttaagttcacataaaccataccgtcataatatgtaaccgctccaggattcagttctttgtaatcttcacttcttccgtgaatatcatagaactcctgaatcttctcatctgttttccagatagaagacagacaagttgtctctgttgtcataacgtcgattccgatacggaaatctgcactaagcttgctgactccaggtccaacaaactccataaccttgttattcacatagccgttcttgaatgtagctccgatgattgcaagagcaacgtcctgcggtcctacacctttcatcggctctccgtctaagtagattccgatcacgcccggcatcttaatatcataagtcttgttcagaagctgtttcacaagctccggtccaccttcacccatagccatcgttccgagtgctccgtaacgtgtatggctgtcagatccaaggatcatctttcctccgcctgcaagcatctcacgggcaaactgatggataactgcctgatgcggtggtacatacataccgccgtacttcttcgcacaagttaatccaaacatatgatcatcttcgttgattgttccaccaactgcacaaagactgttatgacagtttgtaagtacatacggcatcgggaacttctcaagtcctgacgcacgtgctgtctggataattccaacaaatgtaatgtcatgggatgtcagcttatcaaaacggatctgcagacgctccatgttctcggatgtattgtgtgcctttaaaataccatatgccattgtgttctgagcggcttcttccttcgtcagcggaacctgcacattccctgtgtcttctactatctcagttccattgagaagatatacgccattctcgtacaatttaatcatgtaaagacctccttcaatctgatctatagttttgaaataactgctaccatattaacatatttgagtgtttcggtaaatctaaattttcgcaattcagcattgtaactcaataaagtgcaatttttactgattttttagatagaaagcggaaatctcatctcaataataaactcatttttctctgtctttgcgctgatttctccattcatacgtttcacaagttcctttgcaatagatagtcccaatccggtagatgttttgctccttgccacatccgctttataaaatctgtcaaagacatgttctatatcgatctgctccgaatgtatcacctgattgctgattcgtaataccgcgcgttcctgcttgcgttctaacacaatacttatcttcttttctccatgatccagaccatttttaattacattctgaataacacggtggagtccttgtttatttccggctatagatagcagttcttctgtaatctgaatatccggctggattccccttcttacccagtcatcataataggaaaacaccgtttctttcagaatccggttgatacagcaaggcgtcagttccagactataggattcattttttaactttgtgaacatgaaaagttcttccagcatttcattcagactgtgtattctttcatgaataatattcagataacgtctctggtcttcgacattttcgcattcttccataagctgaaaatatccatccagagatgtcagcggtgtccggatatcatgggaaaggttcgtataagtatccgcgatcaaagcttctttctcctgataacgctgcttctcttttttttgtaattccagaagttcattcaatctatctgaaagcgttccgattccacccaaatcaaactcgcgttgaatcaacatgttactgtcatgtttcatcaagaacgccaattggcggcagatgtccttcacctgccgctgatatttccacataataataaattgtaaaatgataattcctgctaatattccaattacgatatacatccgctaaatatccctcttttgaaaaacagcactgcttgcagctatcattatgacagcaaacacaatcgctacgccgaatgcttccagacactcatttccacttggattcataggaagcagtgatatttttccggttatcgtatacttataaatctggaaattctggattcccattttccgaacagcactgtttattaatccgtatacgatactcattatattcattgtaagacaaatcgcgatgaccatgctgatcacattatttttcagaataattgcaatcgccatgcagatcaacacgagtgcataatgaagtgccagctccgtcaggaaataagatagaatagcttttgaacttccccacgtcaattctttaaatactatatagttcgcagctccctggagtaagaatgcgcctgccattgtcagcaccgtaaagaccgccaacgcaatagatctggaaaaaatcagtgttcctcttttttgaacctggccgccaatatttttaatataaccgcttccaatatccgctgttgaaaacatcacagcaaaaatcaccaaaaacaacgcataaaatttcccctgagaatttgcaaagaaaatgtcatacaccgtaaccttttctcccggttctgtcggcagtgtcaccatcattcccacattaatattctccgcagtcggttccgcaaactgctcctgccgcacggtatcttctttacttaatgaatcataatctgtcttacacataaatgttgtaaacagtactgacacagccagcacgatccatactacatacatacttttggtgcgaaacatccggtacaaatccatttttatcatattaagcatgactggcacctcctgtcagattcaggaaatacgtttccagttcttcactcgttatagaaagcccttttaccggaattcctgcctttgcaagctccatattcaacgctgcgctttcattcagacgttcaaaaatgtgaatatgttctttgtctgtcacctgataattcgtgaatcccatagcatccagcaccggaattgccagcttcggatcagccagtgttaattccatccgctcactgcatcttcgcattaattcttctcttgtaagctcctgcaataaacttccattgtgaatgattccataatcggtagcaatcttcgataattcctccagtatatgactggaaatgcaaatcgtcatattcctctctttctgaagtctctgaatcgtgtcccgaacctcagcaattccctgtggatccaacccattgatcggttcatcaaggattaacagatccggttctccaaccaacgcaagaccaattcccaggcgctgtttcattccaagagaaaagtgttttgtctttttccgtcccacatgctccagacctactgttttcaatatctcatcaatgtaacctgctttctttatcccaaacagcttacatttgatattcagattttcatatgcggtcatatttccatataatcccggtgcttcaatcagacatcccacacgggagcggactttctgtaaatcctttcccttgtatccgaagatctcaatctctccactcgttggcctggaaagtccactgatcatcttcaggcaagtcgtcttcccggctccatttcgtccgataaatccatagatagcgccctttttaatatgcatgctgacactgtccacagctttatgatgtccataccgcttcgtcagtcctcgtgtttccaataacatctcactcaaatttttcatctcctttttcttatctgcatttatcataaaagatgaatcctaatcaaacgcaaataaatagtaaaaaaagagtaaagattacgcatgaagacgataaccgattccccatactgtctcaatgtattcctccgaagtcacttgtttgatcttcttgcggatattgctgatatgaacgtccaatgtctttgtctcacccatataaggctcgtcccatgcatattcgaaaatatcctctttactgaaaacctgtttcggatttctgagcagtaattccaaaatcgcaaactcctgttttgtaatcttcggaagtatctttccagcaatttcaacctgaaatgtatttctgtttaataccatatctttaaatgaaagcgtatgctgttcctctgcttccttttcttctttatgacggagctgtacctgaactcttgccagcacttccctgatttcaaatggtttcgttatataatcatccgctccgctcgttaaaacctctaccttttcatccaggctgtcttttgcagtcaacacaataaccggaagatttccctttttccgtatttcctccagaactgcctcacctggaattccgggcagcatcagatccagcagaacaagtgcgtaatcatgatcctgcatatttaaaagcagctttgcttcggtcccggaaaatgcctgctcacaggaatagccttctttggataatgcctcctgaagcaagttattaatatttgtatcgtcttctacaatcagtattttctgcatgatattgctcctttatcttcctcaatcggccatgattttctgagtgctgcataggaaatcaggaagtttgcaagccatccggccggtactgcaagccagacaaatgcaattccgaaccgcggtgcacaaatcaaagcgacagacaaacggatcgcaagatttaccatattcgcaatgagaaacggacgcatgattccaagtccgcgaagaacaccatcggttgccatcttaatacccatgaagatgaaaaaataccccagccatctcatataatcaccggatacctgatacgctaaagctgttccatcttttccaaggaataaggaagaaatctgattgtgcagtgattcaatgaccagaaaagcaaggactgcgaaacatagatccaacaccagtgccgcatgatagccttttttgagccgttcgattttctttgcaccaagattctgggatatatacggcgaaatcgcattgccgatggatacaaaaatcagtgaaaaaacattttccactcgcatcgttgctgagtaacctgcgagtgcctgtgtaccaaatggatttacaactgcctgtacgatcatcataccgatcgacactgtagactgctggagaactgacggtatggcaatttgaagcatcgaatataactcctgtccgtcaaaccattcaaactgacatttataccgtctcattctataaaggaaaatcagaaatgaaaagactgcggaaattccctgtgcaataagcgttgccagagctgcaccaaatacgccgagaccaagtccggctaccatccaaagatccataaaaatatttaatacagatgaaaaaatcagaagaaccaatggaattctggattcaccgatggaagtaaacatcgttgagaggatgttgtacataaacagaaatgggaatcccacaaaataaacccgcagatacagtactgcttcatccagtatatccgcaggtgtttgtaataaactcatcattgaatgcgaaaagcaaaaaccaaagattccaagtagtatgctcaggactaaaaagctgatcagtgatgtcgacacaattgttttcattttaccataatctctggctccaaaataacggcttacgagtacacctgcgcctacaccggcgcccagagctacacaaatgaaaacattcgtaagtgcagcacaggcaccgacagccgcaagtgccgaagaaccaacaaactgaccgacaatgatcgaatcagccatattatatatctgctgaaaaaaactgcctaagatcataggcattgcaaaaacagttaacgctttcaggggcgcatctgtgattagatattcatcttttgacatgatcatacttctcctcaatcaaaatctctggtaatatttgtaagccatttctttctgaaatagtgaataaataccacgggcattttctcgaactcatctaaagtcattacaaagtaaacccagacaggcggtaatttaaaaacatatgctgcaaggaaagtagccggaactgcaacaagccacataaatatggaatctacgatcattccaaatctggaatcaccgccgcctctgaaacacccacatataaggcaggtattaattccttctcccacaagacgccaggttgtcataattataaaaatgctaagataagaaagggcagtctcggtcaatttatcccgatagaagtccagtatcagaggacgaatcgccagaataataacgcatccgatcaggcttacagcaagtgttatcctaagcatccgtttcccgtattctccggctgtatcaatttgatctttccctaactcctggctgataatgatagtcgtagcgttggcaaaaccgcgacaggcaatagcaccaatatttaccaccataacagcaaccgcatttgcggcaaccatgtcatctccgatatgcccaagaattgctgcaaatgctgaagtggcaaaactccagacaacatcatttatcacggctggagtggcaattttcataaagtcatgaaacaaaatacctgatttcgcaaagaagtattttatccggaatctgacatctgaactgtttaatgaatagatgagacaaattaatacctctgtaattctggcaatcacagtaccaagtgcaacacctgtaacgccaagctttggaaatccaaacagaccaaagataaatgtggcattacaaagtacattgacacaaagagaaacaatgtacgtaatagaaggcagcattatttttccaatacttcgaagagcgctcataaaaacctgcgagaaccccataaacataaatgaaaatgaaatcaccttcaaatactcacttccggcagcaatcgtatccggactatttgtgaaaatcttcataaccgtaaccggcatagtaaaggaaataacgaaaaatataagcgagacgatcagtgaaatccgttccgcaagaccgagaatcctttctactgtctttttatccccttttccccagtactgggcacacagaaccgaagttcctgtagccataccgtaatataagcagaacagaataaacgtatactggttcgcaagtgatgaagctgacatcgccgtctggcttacgtatccaagcattaccgtatcggcaatgtttaccaatgttccaatcaaattttgaatcatgatcggaaaggctaattttgatgtgtattttaagaaatcttttttatttagcatacaactgttcttccttaattctataaatgtttaatctacagtactgtttttgcagcatcatcagccttcctcttctccgtaatgtttactcaaagagaagcctcttcctcgtacctctgtaactctgctgatgatcataaatgcctccgggtcaatctgtctgatcaatttctcaacttgtggaagttctcgattagacacaatactcaatacaatctgcttttgttcttgtttgtaaccgccttccccatacagcatcgtcacgcctctgtctacctgcgcaagaattgcctgacgtacttcttccacctgtttgctgataatcttcacttccgtcttggtatttcccatcactaacactttgtccagcactgtcgtgtagatcattaccagtaaaattccgtataaaacgcgttccggaggattatatagaatctgcggtaacagaatcaatatatcaaatacattcagactcactgacaccggaattcgaaaatacttattcaaaatcaacggtggaatatccatacctccggtagaagctcctgttcgaattacaataccaagtccaatcccgattccaagtccggcaaaaatcgtattcagcattggattatccgtgatcaccagatccccaaaaatatgattggccgcttccaatgcaattggatatgtgaaagaactgagaattgtcgtcagtgcaaatttcttaccaagaaaaatcactccaactatcagcatcacaatattaaatgctaagacaaatccagaaattgatgctcccgtaaaatgcttcactaccagaccaataccggttgttcctcctgtcatcagattccccggtaaaagaaaaagtttgattacaaaagcatagaaaacatttccaaaaatgacctttgcaacggtacttgcccgctttaaatatgccttatccataaattcctcccattagccatatgattttaattatccccaaaaacgtccgttagagaatcttccctaacagacgtttttcaaagtatttcctaatacagtgatattatactgagaaatgcggtcagtttcaataggatttttcaaggcacaacatatttaagataatacttttttgtatatttgcgcactaatagaaaagcccgcagaaccgaagtcctgcgggcatttttcattttaagtatcgatattaaatctatctagatattaattactcgatgattgaagcaactgtacctgatcctactgtacgtccaccttcacggatagcgaaacgaagaccttcctccatagctactggatggatcagttcaactgtcatctctacgttatctccaggcatacacatctcgattccttctggaagctcgcaaacacctgttacgtctgttgttctgaagtagaactgtggacggtagttgttgaagaatggagtatgacgtccaccctcgtcttttgtcagtacgtaaacctggcatgtaaatttcttatggcagcttactgtacctggtttgataagaacctgtcctctttcgatttctgttctctgaataccacgaagaagtgctccgatgttatctccagcctgagcctcatcaagaagcttacggaacatctcgattcctgttacaacagtcttcttaacgtcctcgtggataccaatgatttcaacttcgtcagatacgtgaagtgttccacgctctactctaccagttgcaactgttccacgtcctgtgatagagaatacgtcctctactggcataaggaatggcttgtctgtagcacgctctggtgttgggatccatgtatcaacagcgtccataagttccatgatcttgtctccccactctccgtctggatcttcaagagccttaagagctgatccctggatgatcggtgtgtcatctcctgggaagtcatactcgttaagtacttcacggatctccatctctacgagttcaagaagctcttcgtcgtctaccatgtcacatttgttcatgaatacaacgatgtatggtacgttaacctgacgggacagaagaatatgctctttagtctgagccataactccgtctgttgcagctacaacaaggatagctccgtccatctgagctgctcctgtgatcatgttcttaacgtagtcagcatgtcctgggcagtcaacgtgtgcgtagtgacggttagctgtctcatactcaacgtgtgctgtagagattgtgattccacgctctctttcttctggagccttatcgatgttctcgaaatctacagatgcgttaccttctactctgtgagaaagtacttttgtgatagcagctgtaagagttgttttaccatggtcaacgtgtccgatagtaccgatattacaatgcggttttgttctttcaaatttagcctttgccattttgaatatcctccttaaaaatataaccctcaatggggcaaccttgttttggttttctattttaaacctggctaagtttgattatatttcaaacttagccgattttcaagccttttatgatattttaggcatttttgttggataatactttctcctgtacagacttcggtactggctcatatttctcaaagaacattgagtagttaccacgtccctgtgttctggaacgaagatctgtagagtatccaaacatttctgacagaggaacgtacgcacgtacgatctttccgccaccgagatcatccataccttcaatacgtccacgacgtgagttcaagtctccgatgatatctcccatatattcttcaggcattgtaacctctaccttcatgataggctcaagaagtacaggtgcgccctgtttcatagcatccttgaatgcaagggaaccagcgatgtggaatgccatctcactggaatcgacttcatggtaagatccgtcgtatacgttagcgtaaacaccaactacagggaatcctccaaggataccagacttcatagcttcttcaataccttcacctactgccgggatgtattccttcggaatagctcctccaactacagtagactcgaacttgtatgtctcctcaccgttgacatccattggctcgaatttaactttacagtgtccgtactgtccacgtccaccagactgtttcgcatacttgctgtcaatatcaactggctttgtgatggactctttgtaagcaacctgaggtgcacctacgttagcctctaccttgaactcacgaagaagtctgtcaacgatgatttcaagatgaagctcacccataccagcgatgattgtctgtccagtttctttatctgtatgagcacggaatgtcgggtcttcttctgcaagttttgcaagagactctccaagttttccctgtgaagcctttgtcttaggctcgatagcaagctcgataactggctctgggaattccatggactcaagaattactggatgctgctcgtcacaaattgtatctcctgttgttgagaacttgaatccgattgctgcagcaatatctcctgaatatactttatccagctcttcacgcttgttggcatgcatctgaaggatacgtccaacacgctcttttttatttttagtagcattcagtacataagaaccggagttcataacacctgaatacacacggaagtaagcaagcttacctacgaatgggtctgtcatgatcttaaatacgagagcagagaacggctcttcatcagaagagtgtcttactacttcgtttccgtcttcatcaacaccctcgattgccgggatgtctgttggagccggcataaactcgatgattgcatcaaggagtttctgaacacctttgtttctgtatgcagtaccgcagcataccggaacagctgtacactcacatgtagcttttctcagaactgctttcattgcatcgatagaaggttcttcaccctcaaggtattccatcataaggtcatcgtccagctcacagattttctctacgagttctgtgtgataaagctcagcttcatcctgcatctcttccggaatatctgttacagtgatgtcttcacccttctcatcattgtagatgtaggcctgcatctcgaacagatcgatgattcctttgaattcgtcttcttttccgattggaagctgaagacaaatagcgttctttccaagtcttgtcttgatctgatctacagcattgtagaaatcagcaccaaggatgtccatcttattgatgaatgccatacgtggtacattgtatgtgtctgcctgacgccatacgttttctgactgcggctcaacaccacccttagcacagaatacgccgacagctccatcaagtacacggagtgaacgctcaacctctacagtgaagtcaacgtgtcccggagtatcaatgatattgatacgatgctctaaagcgcccggtttcacttttgtcttctcttccaatgtccagtgacatgttgtagcggctgaagtaattgtgatacctctttcctgctcctgttccatccagtccattgttgcagtaccttcatgagtatcaccaatcttatagttaacaccggtatagtaaagaatacgctctgtcagtgtagtcttaccagcatcaatatgagccataataccgatatttctggttctctctaatggatattctcttccagccaagattttttcctcctaaaataattagaaacgatagtgagcaaacgccttgtttgcttctgccatcttgtgcatatcttcttttctctttacagctccacctgtgttgttagctgcatcaagaatctcgtttgccagtctttcttcctgtgtcttctcgcctctctgacgtgaatacatagttaaccagcgaagtgcgagtgcctgtcttctgtcagctctaacctcgatcggtacctggtatgttgctccaccgatacgtcttgctttaacttcaagaactggcatcatgttgttcatagcctcttcaaacacttcaatagccggcttctcagccttagcttctactctttcaaatgctccgtatacaatcttctgtgctacgcctttcttaccatcaagcatgatgttgttgataagtttggtaacaactttattgttgtatattggatccgctaatacatctctcttctgagtatgtcctttacgtggcacggtccttccctccttaatcatattttccggtttttccgggattaattcatcggtactcacatgtgtctttctatgagatcacattccatgtgctcgcagccgcgaaatctatatagcatccgcaacctacgactaatcatagttctgtttgtgatacgatttaactattagttacacttatctaaaatactatactgcaatccgcgacttcttatttagcgtctttcggtctcttagcaccgtacttagaacgagcctgtcttctcttagcaacacctgctgtatcaagtgttccacggataatgtggtatcttgtacctggcaggtccttaactcttcctccacggatcataacaacgctatgctcctgaaggttgtgtccttcacctggaatgtagcttgttacttcgattccgtttgacagacgaactctggcgatctttctcagagctgagttaggcttcttaggtgtagctgtcttaactgctgtacatacacctctcttctgtggtgcagaaacatcagttgcacgtttcttcagggagttgtatcctttctgaagtgccggtgctgtagatttcttctcagaagtctgacgtccttttctaactaactggttaaatgttggcattcttttcacctcctatgaattattcgttaccttgggcttatgcctcaaggggctgcggataattaagtcattatccttatttgcgcatcaaaaagacattgcctttttccacacgctcgtttagtttattacgtttagcgccgaaagtcaaggcttttttcgcattttccatattatttttcatacaaaaataacagatggcactctctttttttcttaagaaaccatctgttatttgttattaaatcaaattcttttttctagcaactatgaaagtaaatctcttctttattttcaacgaaataaattagtacgctttgccccagtataccatatgcttcgccggttttccgcagcatacacatacatctgaaagatgttcttcctcttccggaatacatctagatgtagctccgcctgtctgagctttgatctcatcttcacaggcttcgtctccacaccacattgctttgatgaatccaaggttctcattgaacttctcattcatctcatccattgttgttgcttcattgatatgagaatcaaggaatgcttttgctctttcgaacatatcattctgcattgtctcaagaacttcagcaagttttgttgtaagctcatccagagaaacaacgatcttctctcttgtatcacggcgtacgataactgcctgattgttctcgatgtctttcggtccgatctcgatacgtgtcgggattccaaggatctcctgtccgctgaacttccatccaggtgctttgtcagaatcgtcgattttcactttgtatcctgctgccttcagtgtatcaacaagttcatttgccttatcaagaacaccttctttatgctgagcgatcggaataatcattgtctgcaccggtgcgattctcggtggaataacaagtccactgtcatctccgtgtaccatgatcagcgcaccgataattcttgtagacagtccccaggatgtctcgtatacttcatgaagttcgttattcttatctgaatactgaataccaaatgcacttgggaaggaacttccgaagaagtggcttgttgctgactggagtgcttttccgtcatgcatcagcgcttcgattgtataagtatcctgtgctcctgcgaatttctcactctctgtcttacgtccggaaactaccgggattgcaagaacatcctgtgcaaagtctctgtagactctccacatctgttttgtacgctcttctgcttcttcgtatgttgcatggattgtatgtccttcctgccacaggaactctctggaacgaaggaatggtcttgttgtcttctcccaacgaagaacggaacaccactgattccacaccttaggaagatcacggtaagactgaactgtcttgctccagacatcacagaacagtgtctcagatgtaggacggatacagaatctttcctgaagttcttccagtccaccatgtgttacccatgcaacttccggtgcaaatccttcgatatgatccttttctttctgaagaaggctttccgggatcataaccggaaggtatacattctctactcctgtctctttgaaacgtgcatccaggttcttctgaatattctcccacagagcatatccgttcggaaggtagttcatacatcctttaacacctgaataatcacacagttttgcttcacgcacaacgtctgtataccactgagcaaaatcttcttctctggcagtgatattctgtactaatttctttgccattgttcttctcctttttgtttttttgcattgctgtcccctgacagcagtttgcttttactttaatataaaaaaacgccgggatatcgcatccccacgatagggaccgaatatctccggcggtaccaccctaattaatgcaatacatccattctataatcaaaaccaacacaaattgatctctgtatctgcattcactttcttctcctttaacgcaggacctacgctgtactttcatacagggactcccgggccggttccataccgtaatgcaaaggctctcacctgccgccttctctctgaagcatgctgcgtatctactattcccgttcaacgtcagttatcaaatgaaattctaactgataaaacacccgctgtcaagccaaaaagctttatcctctgatttccagaagctttgctttcaattcattttccatattgcgaagttccgcctccgcttcccggcgtttttctcttccttctctctgaatgttcatcacttcatccaatgtagagatcagtgattcatttgttgcttttaatgtctcgagatctgcaattcctctttcagactcttttgcagtctcaattgtggacatttttaatgtctccgcattcttcttcaacagttcatttgtcatatccgtcacctgtctctgtgctgccgccgcctgtgaagaatgttctactccaagtgcgagaagcatctgactcttccacaacggaatcgtattcacgattgtagactggatcttctctaccatctgtgtatcattattctgaaccagtcggatctgtggtgcggtctggatggagatcattctcgtcagttcaagatcatgtaacttcttttcaaaacggttgcacatcgaatccagatcttttgctgcctgcgcatcttccgggaggccgcttatctgagctttgctcatcaattcagcaagctgtgtgcttcttacttcttccagttttttctttcctgcaagaatgtacatagaaagctctttaaaataagtaagattcagatcatacatcttatcgagtatcgcaacatcttttaaaagctgcacctgatggttgtccaatgctttcacgatctgattcacattttcttcggctttcgaatactttgctttcatagattcaactttattcgatgctttcttaaatattccaagaaatcctttgctctcttcttcatcaaagctcttcagttcagttacaacattcgtaagcagtgtaccaacttctcccagatcctttgacttcacattttccaaagcactttctgagaaatctgccatctttttctgtgtacctgcgccatactgaagaatcatagaagaattcgtcagatcgatctgctgtgcaaatgcatctaccatcctgcgctcttcttctgtcaggatcgtatcatccagcttcggttcttccggctgcaccgccggtttcttttcttcttccgcttgaaacggttccagtgtcagtgtcggcactgtacttacatccttgaatgcatcactcatagtaatcctccatttctgtttgtaactgttttgattcattgtctgtttgggatatcattatttcttcagcccgtcttctgtcagaccttcctgcgcaagcattgtatgaagtactgaaatatctgaagatacatcccatgctgtatcctggaacaggctgtccagtaatttctcaaatgcaatattcaatgtatctatcgtatcttcaatctctttcttggaagaaatgatattttctccctgtactggctgggcatccagctcttcatacgcttcaagaagtttcatcgttgtcggaagataataatccatcattcttcgcatatcattcacagaatccggattctgctccacgcggtcaaaaatacgatccacgagcagttccatgcgggaaatctttgccgaaatcacttctcccggaattgcgtcattcgctgccttaatctttctcacatattcatctcctgcctgtacgatcttctgtacttccggtgaaagtctgtcatactcttcctgcatctttttctgagcagcctgctcctctgccttgcgctgtttcatgtcttccataagagctgtatactgattccatgcatgttcactgaccatcaggcaggattctttctcatccagatgtccctgacagaaccagccttttgtaatcatttttttcacatctttcagaacctttctgacatctcgtcctgtcgcagaagcaatttccttaatatcacaaaattcccggtctctcagaacagatacatattggcgaaaccttcccaccgtacgtaccatatctactcctacataagtcatcactgcaaaagatataaaagcaactgcaaaaattccaatgatcagaccactgactacatcaaacgctgtgatcacacttccaatcaaagtgatgataaggaaaataacagaagtcaatccaaatacagctcctgtcgctgctagaaaagtcccgccgatctttaccgaagttcctttgagatatcttggagtcaccggtaccggacgattctgactataatttctcatttccgacatcttcgattcttgattcggacgatacccctggttttctgcacctgatctgcttccggtattctttttatttccatataatggctgtccggtcttcggatctctgtaccagccaccatttttaatccctgccgagacgcagtccatcgcatggttcaccgtatcagacaccatctggttcaatctgctgtaatcctttgtatcaattgcatcctgtattgtctgctttatctcttctccaaaatgttcccagtcattattcattgatgttctccttaaaagcttgacctgattcgtttgcatcatgtatcattataacattattaattctcagtttagacgcaactttagcgattgtcaagaaagaaggatacaactatgatttcatcacttacccctgaaataatatatgaggacaaggatattatcgtctgtcataaacctgctggagttcctacccagagcagccgcattggcacaaaagatatggtcagtattttaaaaaatcatctgataaaaaatactgctaaaaaaacctcttcacgcgaaccttatcttgctgtcatccatcggctggaccaaccggtagaaggacttcttgtttttgcaaaaacacctgctgccgcaaaggaactttcccgccagcttaccacatctggttttgggaaatattaccgtgcacaggctttaggcattttcgaacacagcgaaggaactctggaagactatcttgtaaaagacggacgagccaacacctcccgtgtctgtgaagaaaatgtgcctgatgcaaagtatgcacgacttcattataaagtaatccatacaggtacacttccttctggtgaacctttttcccaactggaaattcatctggataccgggcgtcatcatcagatccgcgtgcagtttgcacatgccggacaccctctgatcggggatcgaaaatatggcactgccgcatgcacttcacgacagttaatgctttgtgcttgtcgactggaattcacacatccgacaaccggtgaaaaaatggtttttcatttataagacaaaaaggaaaagtgcagtgatcggacaatcactgcacttttcctttcgcctgtttcctatctattgtattagccctgcctttacctgtcatttatccaaataagagcagcaccacaataccctacatctcgtcaacaaccaacggctccggctcttcttcaagtgcctgctgatatcttgcaagaattgttgactgaattcgttctcttgttcctgaattgatcggatgtgcgatatcacgatactcaccatctaatgcttttttacttggcattgcaatgaaaagccccttttcaccttcgatcactttgatatcatgaacaacaaactcctcatcaattgtgatagatactactgcttttaactttccctctttcgcaactttacgtacacgtacatctgtaatctgcatattacagttcccctttctcttttgcattatcacggaatatgaacaccctttttcagggtttttgtgcttatcttggcttataatgcatatctttcattcttttcaataactattttaattccgtcttcccctacatgtcttgtattcgcacggatcgtatccctgctctctacaatacagttctcaatgtatgtattatctccaagatatacatcattcaatatgatagagttcttgatcacgcaattatttccaacaaatactttcttgaaaataactgagttctctatcgttccattaataatacttccacttccaaccagactgttcttcacgatcgcacccggattatattttgccggtggctgatcactcaccttagaatatacacttggcagatccttgaagaaatattttctcacttccggtttcaggaaatccatattcgtcttgtaatatgcatctactgttgaaatattattccaatagctttcaatcttataaccataaatcttctttacattcttataacggatcaggatatcatttacgaaatcatgtctctcttcttccgcacattgttctacaagatcgatcagcagtcttctgcggatcacataaattcctgtagagattgtctgtgatcttgcaatcatcggtttttcttcaaattcttcgattctgcaagattcattcatcttaacggttccgaatcttgtcgcatcttctcctgctccaagttctttacaaacaacagtgatatctgctttcttcgcaatatgatattccagcactttattataatccatcttatagactgcatcacctgatgtaatgattacataaggttcatgacatcttctcaggaaatccagattctgataaatcgcatctgctgttcctctgtaccagtaaccattatcatctgtgatcgtaggtgtaaatacatataatccaccctgttttcttccgaaatcccaccatttggaggaattcagatgctcattcaaagaacgggcattgtactgtgtcagcacagcaactttctggatatgagagtttgtcatattacttaatgtaaagtcaattgcgcgatagcttccggcaaccggcattgctgctgccgcacgtcttgaagtcagctctttcatctttctgctgttaccaccggctaaaataattcctactgctctcatactctgtcacctgcctttatcaatgtctcaccgcttgcaagtactccatctatgtaatcctcggatgatgtcactccactgatggcggtattctttccaatctgtactcctcccggaatcactgaattctctccgatcgtagccagtccaccgctgtaaatattcggtttcatcttattcgggacttcacttccgattccgatagaaacatcatttccaattaccgtgtcttctgctatgattgctttctcgatcacgcagttttctccgatcgtaactccctgcataataattgagtcacggactacgctgccctttcctacagtaacacttcctccaagaacagaactgtggacttctccgtagatttctgttccgtttgcaatgatacatttgtctacaacagcattctctgcaatatactgtggaggaatattcgcactgttcgtatagatcttccagaattcttcataaagattaaactccggaatgatatcgatcagttccatattcgcttcccaataagagctgagtgttccaacatctttccagtatccgttgtactcatatgcaaacagcctgtcccctttttcatgacaatatggaataatatgttttccgaaatcacagtttggctggtctttcagcttgatgagtgcctctttaagaaccggccagctgaagatatagattcccatcgatgccagattactgcttggcttctcaggcttctcttcgaattctttgatcctgctgtcctgatctgtcactacaattccgaaacggcttgcttcttccatcggcaccggcattgctgcaattgtcacatcagcattgtttgccttgtggaaatcaagcatcacttcataatccatcttataaatatgatctcctgaaagaatcagtacatagtccggattataagtctctatgtaattcagattctgataaatggcattcgctgttcctgtataccactcactgtttgtactcttctcatatggtgggagaactgatacacctccaacgttgcgatccaaatcccacggaattccaattccaatatgtgtattcaggcgaagcggctgatactgtgtcagtacaccaaccgtatcgattcccgagttaatacagttgctaagcgggaaatcaataatacggtactttccaccaaaagcaactgctggttttgcaacttttgatgtaagtactccaagtcgactgccctgtccacccgccagcagcatggcaatcatttccttcttatacattacgtcacctcatttcaagtaagctagaatcattataccatatatttagaaataacaaacatattttacaatttttttcatacttttttctcctttttatcaatttctaccaaaaagatcttctttcttttttttcgatatatagtataatataaacgatatagaagatttatgactaaaatcacaagttattttataaaatctattaaagaaagggcgtatctcaatgtataaaatcaattttgaaaagccgatacatattcattttattggaattggcggaatcagtatgagcggtcttgctgagattcttctggaagaaggatttactgtatccggttcagattcaaaggagtctccgcttacaaagaagctggagtctgaaggtgccatcatccattacggacagtgtgccgagaacatttctgacggaattgactgtgttgtatacactgctgcgatcaataaagctaatccagagcttatggaagctgttgcccgcaagattccaatgcttacacgcgcagagctgcttggacagctgatgaaaaattacaagacaccaatcgctgtatccggtactcatggaaaaactactactacatccatgatctcccatattttacttgcagccgatctggatcctacaatttctgtcggcggtattctcaaggcaatcggtggtaacatccgcgttggaaaatccgagacttttatcacagaagcctgtgagtatacaaacagtttccttcatttttatccgaagatcagtgtcatcctcaatattgaggaagatcatctggacttcttcaaggatcttgaagacatcagacattctttccatcagtttgcagcacttcttccttctgatggaactttgatcatcaatggtgatatcgacaattatcaggagatttatgatagtcttgactgcaatgtgatcacttatggttcttctgatatgcttgactacagtgcttctaacatcacttatgatgaaaaagggcttgttgcatttgatcttataaagaacggaaaagtggttgaccatatccagctttctgtaacaggtgatcataatgtatcaaatgcacttgcatctattgctactgctgaactgcttcagattccaatggaaacaattaaaaaaggaattctttctttcagtggaacagaccgtcgtttcgaatacaagggaacatttaacggtgtaactgttgtcgatgattatgcacatcatccgacagagattgccgctactctgaaggctgcacagcattacccacacaatcaggtatggtgtgtcttccaaccacatacttatacgagaacaaaggctttcttccatgaatttgcagaagctctttctcacacggatcatctggtgcttgcagatatctatgcagctcgtgagacagatactctcggagtttcttctgccggtcttgcagaggaagcacgtaaacttggaacagatgcacattaccttccaagttttgaagaaatagaagctttccttaaagaaaactgcaaatccggagatctcctgatcacaatgggagccggagatgttgtcaaaatcggcgaagacattttaaaataaggctttctcaataactttgctaaactattctgtggaaaagtttacatagatatccacatgcatgtgaacttttccacactttatccacattttctccacatagttatctacaaaaaagtcctagttacccactcgaaaattctttttaagattctcatatgatgttataatattcacactaaagagaagaagatatagatttcaggttgcccctcatcagacagagcaagtggcaattggttaatacatagagaaagcaggataagttatgaagactttggttttaaagaataattttcagatgaatatgacaatgctgccgaacagctttgtagatcattatatggcgaatgcgaacggagagtttgtaaaagtatacctttttcttctccgccatgttgaggatgctgcatcttctctgagcatctccatgatcgcagattatctgaataatacagagaatgatgttcttcgcgctttccgttactgggaatctgtcggtcttctcagacttggacacggaccggacggtggaatcactgccgttgaatttcttcgcgatgaagaagagaatacttatggagatacaactgatttttccggctgtgcatcaggctatccacaggattcaattccaactcaggctccggtagctccggtaacagagttccgctcagaagctgtttctgcaccggtagaaagcagtatccagactcctgtttccaatgcggttcctcttgatacattccgtgcccagaaggagatcaagtctctcctgtttatcacagaacagtaccttggcaagacactgacgcatacggatgtcgacacaattacttacttctatgatacgctgcatatgtctgctgatttgattgaatatctgattgaatcctgtgtagagaacggacataagagtatgcattatatccagaaagttgccatttcctgggtagagaacggagttgaaactatatcacaggcaaaagaacaggctgctgcatacagccgtaactgctacacggttttgaatgcattcggcattaagaacagaggacctgcctcttccgaactggaatatattaataaatgggctgatacttatggattttccgctgacatcattcaggaagcctgccgcagaacaatctctgccacacatcagccaagttttgaatatgctgactccattctcacaaaatggtatgaatgcaatattcatcatctgactgatatcaatgccttggatcatgaattccagaaagaacgttccttacatagaagtcctgccacaaaaccaaagaatgtcacaagaaatctgaataattttgagagacgttcctacgacatggattctctggaagagcagcttttaaagagcaactaatgaaaaaacaatagtttagaagatcaattatatttaagagaatttaaaaggagtctttacatgggattaaaaaattcacagtaccatgcaatcatgcgtaaatatgagcagaaacaattacatagccatgacattcagatggcccggtatgaagaagtctataaaaagctccctgaattcaaaacacttgatgactccattgcctcactgtctattcagcatggaaagaaactacttgatggagataccagtgcagttgatgctttaaagaaagatcttgcagaattacgtaatcgtaagattcatctgctcaaatcagccggcttcccagaagattatctggagccggtttacgactgtccggattgtaaagacactggatacattggtaataaaaaatgccattgtttcaaaaaagcgatcattggattgctttatgaccagtcaaatattaaaaaattccctgtagaagcagattttagcaatttcagacttgactattatccggtttcacattacgataagaaaacgggacgttcttctcgttccatgatggaagatactttgcgcatctgccatcattttatcgacagctttggtacagagtttaacaatctctttttctatggagatgtcggtgttgggaaaacctttctctccacctgtatcgcaaaagagattatgaacagagaatattctgttttgtatttttctgctccacagctttttaatactcttgccaagaatgcatttgacaaaaatgacattgatgcacataacatgtgtgaatacatttttgactgtgatctgcttattattgatgatcttggtacagagtacacaaacgcctttattgcatcacagttttttacttgcatcaatgaaaggctgctgcataggaaatcaacgattatttcaacaaacctttctttggagtcgctcgctgatctttatactgagcgttctttctccagaattacaagcagatatagtctgttgaaaatagtcggtgatgatatacgtattaaaaagaagttagaacattaggaggattatgactcatgttaagtcgttcagaacgtatcttggagaacataccagtaggaagccttggaatcattcctttacttggctgtgaagagcttggaaataaggtaaatgattaccttgttaaatggcgccgcgaaagcgctcacgagcacaagaatgatgttgctttctccggatatgagaaagagaattatctgatcaatgccagcgtaccgcgttttggttctggtgaagccaaaggtatccttggagaatccgtacgaggaaaagatatttacctgatggttgatgtatgtaattataatgttacttactctctgacaggaaacacaaaccatatgtcaccggatgaccatttccagaacttaaagagaatcattgctgctgtaggtggtaagggacgccgtattaacgttattatgccattcctttatgaaagccgtcagcataagagaacttcccgtgaatctcttgactgcgcacttgcgcttcaggagcttgtccgtatgggagttgacaatattatcacttttgatgctcatgaccctcgtgtatcaaatgcgattccgctgagtggatttgagacaatctcaccaacttatcagttcatcaaaggtcttcttcgcaaggtaaaggatcttcagatcgacagtgaacatatgatggcgattagtccggatgaaggtggtacaaaccgtgctgtatatcttgccaacgttcttggtctggatatgggtatgttctacaaacgccgtgattacactcagattgtaaacggacgtaaccctatcgttgctcatgagttccttggaagctctgtagagggcaaagatgtaattattattgatgatatgatttcttccggagacagtatcattgaagttgctacagaattaaagagacgtaaagcaaaacgtatctttgccgctgctacttttggtctgtttactaacggaatggagaagtttgacaaagcttatgaagaaggtattattgatggtatcctgacaacaaacctcatctatcagacaccaaatcttctttcaaaaccatattatatcaactgtgatatgagcaagtacattgctctgatcattgatactctgaatcatgacggatcactgagcgagattctcagtccgaatgagcgtatccagaatgtacttcagaaatataaaaatggagagactatctaaatataaatttagcttagaaatcattttactgatatacggatgaaaacagaaaatattattttagaaagtcgattgttagaagaatgatacaggaacgccgactcaaggttacgcatactgttcatactagaaaaaacaacagactgctaaaagcaaagaaaggattgacaaactcgctgccactcagacagctgtcaatcctttctttaacgcaatctattgtttttcaagtatgagcaagcatgctccacattcgtcttcattcctgtatcactcttctaacatgaaacttcttcaagctcatattttctgtttattgaaaaagatagacttctacgttaaattttattaaacacaaacacgtttgagagatggatatcattctacagaacatccagtgcatctgcttcttaagtagagttcttctttcgagagagtagaaatcagatagcgacgaaaaagtctgtctattagaataaactttataagtgctatcggatttcgcccgcactcgaaaaagaatctctacactaaatctttatttgtataaaaatatccccatagacgatttctcatccatggggatatttttttatgtcagcatattaaatatgctttttttcttattcttctgtagactcttcagtttctgttactgtttcctcaactgcatctgcattttcgtctacaatagcttcttctgtaacttcatctgtcagatcaccattctcgtcgaattcaatgtcatcttcaagatccagttcatcttccatcttaatatctgtgttgagttttacatcacggtacttcttcatacctgttccggcaggaatatgtttaccgatgataacgttctctttcagaccaaccagatggtcaactttacccttgatagctgcttctgtcagaacctttgttgtctcctggaaggaagcggctgacaggaaggattctgttgccagagaagcctttgtgataccaagcatgatctgctctccggtagccggctcttttccttctgcaacaagctgctcgtttacttcttcgaactcaagaacgtctaccattgttccaggcaggaactctgtatcacccttctcttcgattctgatcttcttcagcatctgacgaacgataacctcgatatgcttatcgttgatctcaacaccctggagacggtatacacgctgtacttcctggagcatataatcctgtgttgcacgaagtcctttgattttcaggatatcatgtggatttacgctaccttctgtaagctcatctccggcttcaagcataacgccgtcctgtactttgatacgtgatccgtaaggaataaggtaggatttggattctcctgtctcttcgtttgtaacgataacctcacgtttcttctttgtatcactgagtgttgcacgtcctgcgatctctgtgatgatggcaagtcccttaggtcttcttgcctcgaaaagctcctcgacacgaggaagaccctgtgtgatatcgtcaccggcaactccaccattatggaatgtacgcatagtaagctgtgtacctggttctccgattgactgagcggccatgattccgactgcctcaccaacctgaactgcctcacctgttgccatgttcgcaccataacatttggagcatacaccgttcttacatttacatgtaagaattgtacggatcttaacctgctcaagaggatttccgttctcgtcaacacctttcttcatcacgcgctctgcacgacgaggtgtaatcatatggtttgcttttacaaggacgtttccgtctttatctttaagatcctcagcagcaaatcttcctgtgatacgatcctgaaggctctcaatctcttcatttccatccatgaatgcagatacatacattcccggaatcggctgacccggttttgcacaatctgcatcgtgaatgataagctcctgagatacgtctacaagacgtcttgtcaggtaaccggaatcggctgtacgaagagctgtatcggccattccttttcgagctccatgggcagacatgaagtattccagtacgtcaagaccttcacggaagtttgacttgataggcaactcgatcgtacgacctgttgtatcagccataagtccacgcatacctgcaagctgtttgatctgcttgtcagatccacgggctccggaatctgccatcatgaagatgttattgtatttatcaagacctgtcagcagtgcctctgtcagtttatcatcagttgctttccatgtctcaacaacttctttgtaacgctcttcctctgtgataagaccacgtttatagttctttgtgatcttgtctactgtatcctgtgcttcctgcatcatctgcggtttctgcggtggtacagtcatatcggaaatagatactgtcatagctgctcttgtagagaacttgtatccgattgccttaacatcatcaagaacttctgctgtctgtgtagctccatgagtgttgataactttctcaaggatctgcttcagctgtttcttaccaacatggaagtcaatttccatcttaagttcatttccctcaacctcacggtctacaaaaccaagatcctgtggaatgatctcgttaaacaaaagacgaccaagtgttgcatcgatagttcctgtcttctcttctccatttgcaagagtctttgtcacacgtactttaatctgtgagtgaagtgtgatatatccattctcgtatgcaagaatagcctcgttcacgctcttaaagaacatgccctctccctttgcaccaggacgaagctgagtcagatagtaaataccaagtaccatatcctgtgaaggaacggctaccggaccaccatcagatggtttcagcaagttgtttggtgaaagaagaaggaaacggcactctgcctgtgcttcctgtgacagcggtacatggacagccatctggtctccatcgaaatcggcattgtaagctgtacataccagtggatgaagcttgattgccttaccttctacaaggattggctcaaatgcctggataccaagtctatgcagagtaggggcacggttcagcataaccggatgctctttgattacttcttcaagcacatcccatacctctggctgaagtctctcgaccattttctttgcatttttgatattgtgtgctgttccgttcgctacaagctctttcataacgaatggcttgaacagctcgattgccatctctttcggcagaccacactgatagatcttcagttctggtccaacgacgataacagaacgtcctgaatagtcaacacgttttccaagcaggttctgacggaaacgtccggacttacctttcagcatgtcagacagagacttgagtgctctgtttccaggtcctgttaccggacgtccacgacgtccgttatcgatcagcgcatcaacagcttcctgaagcatacgcttctcgtttcttacgataatatctggtgctcccagttcaaggagtcttctcagacggttatttctgttaatgattcttctgtacagatcattcaggtcagatgttgcaaaacgtcctccatccagctgtaccataggacgcagatccggcgggataaccgggatagctgtaaggatcatccactccggtctgtttccggactcgcggaatgcttctacaacttccagacgttttacaattctcgcacgcttctgtcctgttgcattctccaggcctgcctgaagttctgcatattctttctcaaggtcaatagactcaagaagctctttgatggattcagcacccatacctacacggaatgcatgtcttccccatttttcctttgcttcctgatactctgcctctgaaaggatctgcttgtaagagagatctgtctctcccttatcaagcacgatgtaagaagcaaagtaaagtactctctccagtgttcttggagaaatatcaaggatcagacccatacggctcggaattcctttgaagtaccagatatgggataccggtgctgccagagcgatgtgtcccatacgctcacgacgaacactggcctttgtgacctcaacaccacagcgatcacatacaacgcccttataacggatctttttgtatttaccgcagtgacactcccagtctttgcttggtccgaagattctctcacagaaaagtccgtccttctccggcttcaaagtcctgtaattgatggtctccggctttgttacctcacctctggaccactccaggattttttcaggtgaagccaggccgatcttaatcgcatcaaatgttaacggttcatattgttgttcattgttatttggcataaaaacggctcctccttattattcctcacccaggtaatcatcatcatcaaaacttaagttctcaagatcgctgtcgtccggctcttcgtccggttcaacatcttccagttcttctccgacaaactccttctctgtgaatccatgctctccgaaagattcattctcatcacgatactttctgtctccttcgatgatatgacgcaggtctgtctcaccgtaatcaacgctctccatgatcttaacctctgtattgtcatcacgcagtacacggacatccagagcaagtgactggagctctttaagaagaaccttaaatgactcaggaactcctggttcaggaatattctctcccttaataattgcctcatatgtcttcacacgtcctacaacgtcgtcagacttcactgtcaggatctcctgcagtgtataagatgcaccataagcctccagggcccatacctccatctctccgaaacgctgtccaccgaactgagcttttccacccagcggctgctgtgttacgagagagtaaggaccagtagaacgagcatggatcttgtcgtctaccagatgatgcagtttcagataatgcatgtgtccgattgttaccgggctgtcgaagtactctcctgtacgtccgtcacgaagacgaactttaccgtctcttgacagcggaacacccttccagagttctctgtgatctctgttctcagacaggaactggagaacttccggacgaagctcttcgccatgcttcttctcgaactcatcccactcaaggtttacataatcatttgccagatccagtgtatccataatatcgttctcgttcgcacctgcgaatacaggagttgatacgttgaatccaagtgcttttgctgcaagactcagatgaatctcaagcacctgtccgatgttcatacgagaaggcacacccagtgggttcagcacgatatccagaggacgtccattcggaaggaatggcatatcttctactggaagtacacgggaaacaacacccttgtttccatgtcgtccggccatcttatcaccaacggagatctttctcttctgagcgatgtaaatacgaactgcctgatttactccaggtgacagctcatctccgttttctcttgtaaacactttggcatctactacgataccatattctccatgaggtactttcagagatgtatctcttacctcacgtgctttctcaccgaagattgcacgaagcagtctctcttcagcagtcagctctgtctctccctttggagttacttttccgacaaggatatctccggcacgaacctcagcaccgatacggatgattcctctctcatccagatctttcagtgcatcatcaccaacacctgggatgtctcttgtgatctcttctggtccgagctttgtatctcttgcttctgcttcatattcttcaatatgaacagatgtgtagacatcatcctgaaccagtctctcacttaagagaacagcatcctcgtagttgtaaccttcccatgtcatgaatccgatcagtgggttcttaccaagagccatctctccaccggatgtagacggtccatcagcgataacctgtcctgcctcaacgcgttcacctttgtcaacaattggtctctggttgtagcagttgctctggttacttctctggaattttgtcagtttatatgttttctttgttccgtcatcatgtctgatcgtgatgcttgtagatgtagagctttcaaccacaccagcctgctctgcaacttcagccacaccggagtcaacagctgtcttaacttccatacctgttccgactaccggagcttctgttgtaagaagcggtactgcctgacgctgcatgttagatcccatcagcgcacggttggcatcatcgttctgaaggaacggaatcaacgctgtagccacggagaacaccatcttaggtgatacgtccatgtaatcgaatttatttctttcgtagtcctgtgtttcctcacggtaacgaccggatacgttcttattaatgaaatgaccttcttcatcaagaggtgtattcgcctgtgctacatggtaattatcctcttcatcagcagtcatatatacaacttcatctgtaacaaccgggttcatcggatctgtcttgtcaactttacggtatggtgcttcgataaatccatactcgttgattctcgcataacatgcgagggagttgatcagaccgatgttaggaccttcaggagtctcgataggacacattcttccatagtgagaatagtgaacgtcgcggacctcgaatcctgcacggtctcttgacagacctccaggaccaagtgcggagagacgtctcttatgtgtcagctctccaagcgggttgttctgatccatgaactgtgacagctgggaagatccgaagaattccttcactgctgctgttacaggcttaatgttgatcagggactgtggtgaaataccatcctgatcctgtgttgtcattctctcacgaacaactctttccagtctggacagaccgattctgtactgattctgaagaagttctccaaccgcacggatacgtctgttacccagatggtcgatatcatcatcatttcccatgccatactcaagatgcatgttgtagttgatagatgcaaaaatatcttcttttgtgatgtgcttcggaatcagatcatgaagatctctcttaatcagtctcttcatctcatctacatcacctgcagattcttcaatgattcctgcaagaaccggataatatacctgctctgtcacgccaacctcggccggatcaatatcaacaacagcctggaggtcaaccatcatattggaaagaaccttgatatttctggaagtctcttcaccctctacccagatgtacggtactgccgcattctggatcatatcagcgatctcacgagtaatctttgttcccttttcagcaacaacttcacctgtgatcgcacttacagcatcctcagcgaggatctgtcctgatacacggttcttaagaagaagcttcttattaaacttataacgtccaactttggcaagatcataacgtcttggatcaaagaacatgcttgtaatcaggctttctgcactgtctactgccagcggctcgcccggacggatcttcttatagagctctaacagaccttcctggtagttctcagaagtatcttttccaaaacttgcaagaagttttggctcttcaccaaagagttcaatgatctctgcatttgtacctactccaagtgcacggatcagaactgtgatcggcacttttcttgtacggtctacacgtacatagaaaacgtcattggaatcagtctcatattccagccatgctccacggttcgggataacagttgctgaataaagtttcttaccgaacttatcatgtgcgattccataatagatacccggggaacgcacaagctggctgacgataacacgctcagcaccattgataacaaaagtacctgtctttgtcatcagcggaagatctcccataaagatctcatgctcgttaatctcatcagtctccttattataaagccttactctgactttcagaggtgctgcataagttgcatcacgttctttacactcatcaatcgtatattttgcatcttcctcgcagagtgtaaaatccacaaattccagactcagatgaccattgtaatctgcgatcggggaaatatcatcgaatacctctttcagtcctttgtcaagaaaccactgataggaatctttctgaacttcaatgaggttaggcatctccaatacttcttgctgcctggaatagctcatgcggaagctttttccggttttgatgggacgaattctgtttttctccattgacgtttcactcctcatttattgtttttgcaggcaataaactgccttttacgagttccagttatataaaaatgaaaagagccttgcgacagtattctctgtcactatatggcatacctttccacaatagcgcattttctactatatcacaaagctctttttattgtcaacatgattcttgtgttttttatatttttcttgacttttttctcaagatatgttatatcttccgctattctaagctttttccttttgaacagtatctttttttcagaaataacttctatatcatatcttcataaagacagatcagctcacgataaacctgaacacaccgctcaatatccgcaatttcaacatactcatccggtttatgagcctgtgcaagatttcccggcccataagacatacaattcggatttcccaaaagacctgccacaactgctgtgtctgtataacccgtgaacgctgacacaaccggatcttttccagtaacttttttcactgattcagataaagctttcataagacctgactccatgtgtgtctccaccggtggtctgtcacctgtaatcttataagaaccctttacacccggaactgcattttccccaatttcaattgcttttcgaacaatcttttctgcctcttgtgtattcatcggcggaacaagacgcatatctatcgtcaccatgctgtgatctgatactacatatggactgtatcctccggaaatctgtccaaatgtaaccgtagactttccaagttcttcatgtgtcggtacttttcccatcgcttttcggatctctgcgatcataaatgcgattccggcgattgcatctgcccccttctccggcatactcgcatgtgcagtaataccttccacattaagttcaaaccaggttctccctttgtgagccatctgaatcattccggaagtcggttccatatcaagaacccagtcttccttctgaatccatccttgttgcactgctgcttctgaccctttcatatctgcttcctcgtctactgttccgataaagactaatgttcccggaagtttttctatatcctcagcattctctttctgtgattttgccacctccgcaaatgctgtcaacgcacttgcaagtcctgacttcatatcacaagctcctcgtccccagattttcccatttgaaacttctgcgccgaatgcattttttgtccatccttcgcccttaacaaccgtatccatgtgacagataaataccagtgccggatgcgctttcgcacctttcacaacaccttttacaatttttcttcccggctctacttcgtaagcctctgtatctgctccactctctttcaaatagtcgcagatatattcaccaatctcggtttcccagcttcctggatccgtactttctttcttaatcagctctctcgtcaactcaactgcatccatttctaacgcctctttcgcaaaaagaccgcagaagcatatcatcttctgcggtcggaataaacttatattcaggaaaattatttaagagtaacctctgctccctgctcttcaagtttagttttgatttcctcagcctctgctttagaaactgcctctttaactaccttcggagctccgtctacaagctctttagcttctttaagtccaagacctgtgatctcacgaacagccttgataacttttactttagatgctccagcggatgtaagctctacgtcgaactcatctttctctgctgctcctgcaccctcagctgctgctgcaactacaacgcctgctgctgcagatacgccgaactcttcttcacaagctttaacaagctcgtttaactctaatactgataactctttgatcgcttcgatcatttcagctgttgtcaatttagccattttaaatatcctccatttttcttttcattcttaattaattagatgagcatctgctcatatatgctgtctgtatccagatcagctgacgcatattactctgcgtctgttgctgtctcctctgctgcttctgctggagccgcttctccaccctgctctgcgatctgtttgataacacgagcaaagtttgtgataggtgactgtaagcttccaagcaacttggaaagcagttcgtctcttgaagggatcttagcaagttcagaaatacctgctacatcatatgctgttccttcaactacaccacccttaagttcaagtgccggagcatcctgtgcaaatttgtaaaggattcttgccggtgctgttgcgtcatctttagaaatagcaatagcgcttggtccttccaggcagtcatcaagggctgcaaattcagtaccctcgaaagctctcttcatcattgtgttcttgtaaactttgtagatcacaccagcttctctaagctgtttacgaagctctgtatcctgagcaactgtaagtccacggtagtcaacgagaactactgactgagcgtctttaatctcttctgcaatcttgtcaacgattggctgttttacttcaacctttgccacttttcggtacacctccttatattattcgtgtactgccaaagttcccagcagatcactctgctgaaactaaaaaaatctccaggtccaaagacgtggaggttctacaaattcatacgcatgtaaaaattcattcttcctcggtaggcgttcataacttacgcttttcagcacctactgtcttcggcagttgctaggctataataccatgttattttccatatgtcaagcctatttttcatctttttctttttttctttttcaaaagaggatccgccgaaagcagaccctcctctatgacagtctcgcaactgtctcttttacattttattatgcaagcttaaccgggttaacctttacgccaggtcccattgtagatgtaagagttacactcttcaggtactgacctttaacagcggctggtctaaccttgttaattgcatcgataagcgtctggaagttgtccgctaactgctcctctgtaaaggatgcttttccaaccggaacatggataatgtttgtcttgtccagtctgtactcaatcttaccagctttgatatcgttgatagcttttgtaacgtccattgttactgtaccagccttcgggtttggcataagtcccttaggtccgagtacacgtccaagacgtccaacaacacccatcatgtccggtgtagcaactacaacgtcgaagtcaagccatccctcgttctgaatcttcgggatcagttcgtctcctccaacgaagtcagcacctgctgcttttgcttcctcagccttagcgtccttagcgaacacaaggatgcgaaccttcttacctgttccgtgtggaagaactacagcaccacggatctgctgatcagcgtgacgtccgtcacaacctgttctgatatgagcctcgattgtctcgtcaaactttgctgttgctgatttctttactaatgctactgcttctgcaggatcatagagatttcctctttcgatcagttttgcagcttcgatatatttttttcctcgtttcattttacaataacctccttgtggtattggcgggaacttgcccctcccactttatgaatttactaaacaattgaactctcagcgctctctcccccgaggacaccggaaaaggtcggctgattgtatcctacaatataatcgttataaaatctggattagtcttctacaactacacccatggaacggcatgttccagcgatcatgctctcagcagcctctactgtagctgcgttcaggtctggcatcttcatttcagcgatctctctaacctgagcttttgtgattgtagcaacttttgtcttgttcggtacaccagaaccggactgaatcttacaagctttcttaataagaactgctgccggtggtgtctttgtgatgaagctgaagcttctgtcattgtaaacagtgattactacagggatgataagatctccctgatctgctgttctagcattgaactgttttgtaaattctacgatgtttacaccgtgctgtccaagtgcaggaccaaccggtggtgccggagttgcctttccagcaggaatctgtaatttgatatatccttctactttttttgccatttcaattacctccttgtggtattggcgggattctcatccctcccacgcaattttaatccattttcttcacttctgaaaaaccaagttcaaccggagtttctcggccaaacagctcaacattgattgtcagactcttcttctgttcgttgattgtctgaacagctccaactgttccttcccatgcaccgctaagtacagttacaacatcaccgatctcaagatcaaggatcacctcatcctgtttgattccaaggttctccatctcactctcatcaagcggtaccggcttggatccaggtccgacgaatcctgtaacacctcttgtgtttcttacaacataccaagtgtcatcattcatgatcatgtggatcataacatatccaggaaacatctttctctgtacgaccttttccactccattacgtatctcaggtacttcctcaagtggaacacgaacttccaaaatctggtcttccagatgacgagtctcaattgtcttgtcaatgtttgcttttactttgttctcataccctgaataggtatgaacgacgtaccattttgcctctgacataaaatcacctttctgctgcgatcaactatttcactaaaaagtcaattccatatctcaaaagcgcatcaactactgagatcagcgctccaagcactacggagacagcaacaactgccgtggtctgtttagcaagtgtattcttgtctggccaaacgatcttcttgaactctgccttaagtcctttgaaccagctctttttctgagtttttgtattctcacccataattccacttcctttcgacaacaattattttgtctctttgtgcagtgtgtgtgatttgcagaatctgcagtacttcttggtttccatgcgttccggatgagtcttcttatcctttgtcatgttgtagttacggttcttgcattccgtacattccagagtaattcttgtgcgcacaacttccacctcgcttttaatatattcacctacgtgttgctgatggttgcgagccatcaatttttaggcataaaaaaaaagcctacttccattcgcccaaacattgtatcatgggggcaaacagaagtcaagcctctttcttaatttttcaatttagcattttttatatccactgcttcttcatttacatccgcagttccgtatcattcaccttgtccttccgacttctcatcgtaagtgtcaaggaaatgatgcttctcaccttttgacttatacgcaactacagtatccagatttacattttcaacactcttgaaaatatttccctccacatatggatttacttttttcaatgtagcaatcaattctttgatttctttacgcttagaaagattctcttcattctcagttgtagcgcacgcttctgtaaacttacatgcacactgaagaaaatacagatcattataatctctccatgctttgatatcttcttcgcgaaccatatatagcggtcggatcagttccattccttcaaaatttgtactatgcagcttcggcatcatcgtctgcacctgcgctgaatagagcatccccatgaggatcgtctcgatcacatcatcataatgatgtcctaatgcaatcttattgcatcccatcttctgcgcatgactatacagatatccgcgacgcattcttgcacagagataacatggtgacttttctatattaaaaactgattcgaaaatatctgattcaaaaacctctatcggaatctccagccgctttgcattctcctctatcacctgacggttaaccggactgtaccccggatccatcacaagaaacttcacctcaaaatcaaacttattatgacgcttcagttcttgaaaaagctttgccagcaacatagaatcttttcctccggaaatgcagacagcaattttgtctcccggttttacaagttcatattcattgattgcctttgtaaatttacaccagatattcttcctgaatttcttgcgcagactctgctctacttcctccgcaaagcttaattctttctttgacttactcatctctcttcccctgtcgttctattcacattttgccaaatctttaatcacttcacctgcaatgatcaaccctgccactgatggcacaaatgccacactgcccggagtggatctgcgttttgcagccttgtattccagattttcctgacaagtttcctccacattgcaattatctgaagtatcttccaatggacggatcggctcttcttctgaatatacaactttcagtttcttaacaccgcgtttctttaattctcgtcgcattaccttcgcaagtgggcataccttagtcttataaatatccgtcacacgaaacgcacttgcatcaagcttattccccgcccccatgctgctgatgatcggtatatccaattctttacacttcataactaaagcaattttagctgtcactgtatctaccgcatccacaacatagtcatattcttcaaaaggaaattcatctgcattatccggcagaaagaaacaattgtgaatgttcactttcgcctccggattaatatcgagaatcctgtccttcatcacttctgttttatattgaccaaccgtctttctcgttgcaataatctgtcggttcagattactcatacagactttatcattatcgatcagatccagctttccaactccgcttcttgcaagagcttcacacacgtatccaccgacaccaccgataccaaatactgcaacgcgggcgccttccagcctgttcattgcttccttacctaaaagcagttctgttctcgaaaactgtgttaacattctcggttctcctcttctattcctcttacataaatgttccgccacccggaccgcctcccaggcacagtccgccactgttacagcaaatattgcacatcagattggcaatacatagtttcacacaccagctactattataggttcccggatatccgtacattgtctgtcttgtctgataccagtttccgccaccttccagttgttgaagtaacatctgatactgcatattctgtggttccagacgaactgcttctctcgcatgttccaatgcagtcacgttatttcctaatccggaattcgccgatgcgctgtagaaataccatcttgcactatgctgactgattccgtcaagtacgttaagagcctctttataatgtccgcttcgtatgtaattagctgccgcattcagatgtgcatcttcctcactcatcccggaagttctacccgtacttcctgctgaaccatatccataagaaccaaaaccgccgaatcctccaaacgggtcgtaacctccataacctgaaccatcactcgaaccatatccggaagtatatcctttttcgcgttcatccataatctgctgataagcctgctgcacttccttaaacttcgcctcagcctcatctttcttcggattattgatattcgcatccggatgatactgtcggctcagctttcgataagctttcttcacatcttcatccgtagcattcctgtctacacctaatatactgtatggatctgacatccttcctatttcctcgttctttctcttgcctttattctaacaaacagttactgttcacacgatgtgcgaccagcaacacttgaatatcataacagattgctcgtctccagtaaacctgtcaactcttcttaataaatgttgttccacatttcggacagcgaatctcaatctttccctttcctttcggaatacgaatcttctgtttgcaccccggacatttataaatatgatatacctttctttgcgccagactgttcttctgctgctgaatataagtcctaatcttgtatgtctttgcaagatacttctgattttccgcatatcgtttagatacatttttggagaatatacggaaataacaataaatgatcaatatccatccaagtaaatagaataatgatcctgcccttcctcctgcaaaaaatgaggataagagcactactatcagtcccccaataagcagagccttagagaactgatccaatccataccttccctgcataaaacgtaaaaacttttctttcacactaatccttctttcttaaattaatccgcctgcaatcttccatcactctttacaataacagtatcttgtcatgcatttcttgagttaagtttttcacaaaaataatatgtgctatattctgcgctgttttcactcaaaagtcaattaaataaatataaaatgtggtaactgtccaaaggaaacgcaccgaattttcttcgttttctccaaacagttaccagtctttattgattcaatatattattacagatttcatccgagatcaggtacacgatccttgaatcattcatcatgacatatctgtctccacttccattttctcctccgatgtaaagcgtcatggtctgatcttcatcatcgcttgtataagtaacttctactgtgattctggaagtatcatccagaccataccctgcaagatccgcatcatctacagaataatccgccgcctctgacagcttcacagcaccaagtcctccggctactgctgcaacatcttctgcctgattctcattttcggaatcataggttgttgtctcaccgttctgtgtgatcacttcttttttcagatttccacttccgatacttggataagtatccaactgagtaatctgatccagttctgtctggatatcatccaatgaagtcgccggaattgtataaaccttttccgtatcgtccactgtcgcatagtaatcatttccggtcgcattcccaaccttgattgttgtcacagttccatcttcatctgtcagtgtaactgtataagtcggatgatctaatccatattcttccagcgcatccgtatcctcaagttctcgatccgcactcaactgtcccatggcatcagccactgtcttcggataactctgacgcaatggaaaatctttatctgcggtatagtaccaggtatctccgtctttctcaaaattcatttcacccgtaccaagatcatatttcaccccggtaatctctgaggtcttcaggtctgtcactttcaccgtttcttcttccttggaatcctgcttcttattccatgtgcttaaggcaaaatagaggataaggagcaacaccagaacaccgatcagaatcactggccctttctttttcttcattctaattttcttcctccttaagcttttcttcttctgaaccatacgctgaatccgacgatcagaatcactgccgggattccaaagattacaagaaggctgaacagaccggcatgctgtatcgtattatactctgttccaaggctctttgcctcgatggacagattctgtactccgtcaaagtttgcacttactgcattcataaagatctgtgtattctcaagctgtgaaaatgcatctgtaatattctgatcgatcagacttcctgcggagatcaccgtcagacgggcttctgttgtactgctttcctcagaatcttccgtactttcactatcatcagttgttgtatctgttgcctcggcatctgaactattcgaagaagaatcatcttccgaagaaattgtctctgttgcgacaactccaagttcatacgttccctgtttctgttcggactctgttactgcgtatccattttccgatgtctccatgaatgcacttgttgttatcgtatctcgtgtcggatctgtcaatgtcattccatgtgcattcgtcaaaagcaccatctgagaactgattccgttcgcaagatcaccggatacattcagctgtgggaagatataatatggctggttctgataacatcttgtcggatccgcaatataaccatctacaccttcaattccatacaccttcagcacacttgccagatttgggaaatccgtcagagaggtatccccaagcagacacatcacttttccacctgctgccagataatttgtcagaagtgtcacttcattttctgaaaggtcattcgtcggtgcattcataagcagaagatcacaatcatccggaatggaatctgccattagaagattcagttctgtcagcgtataattgtttttactcatcaagtctgtaactgtagatgacagttccgcctctccatgtccgcttactttatagattgtcttctgcacatcacttgtcacataattcaccgcacttgtcaactggccatctccgtcaaattctgaataagatgcatttcctgaataataataggaagacgtatccataacaagaatcttgtcaaaagaaatagttgttgtctttcctgttgcttcacaagatacaacaattgtattttcggatgcattatactctgtcaatgctgacggatgcagaaccggatcgatccactcaacattgatcttatctgaaagtgctgcatatttactgataaatgtcttaatcctgtcatccgtgtctttctttaccgcaagaactttcatatcgactttatcattcaatccgctcagcagatcctttgttgtatctgaaatttcataaatctttgtactgctcatatccagattgcgataagcttccggaatctgtccgatcaccagattgaacacaataacaatcgcgattacaagtactgtcagccccacactgtaagatccgtgctttgtaccggaggtgtggaacatccctttgatctttcctgttgttttctttcttctatccactttcatgccctcctaattccaacgtctcttctggattgcctgtactgtcaggaacacaaagactacgatcagtgaaagatacagcgcgattcctgttatatctacaatactgttcgaagtgatatccgtaaatacatctgcaagtgccagtcttccaagcatctttgtcagcaggttttcataaagacttgatttcacaaagtacacaaccacaccggcgatcacaccaactgcttcgatcacaccggcaatcactatatttcctgtcatctgataaatataaacaacaatcagagtcagaatgataagcacaccgaccaatccgctgactgcactgcttggaagcatggaaagaattccattccaaagatacaagataagcagaataccaaatgtactgataaatgcgatcatctgactttccgtcagagcagacaggaacatgccgattgccgcatatacacaacccaacaggaagaataccccgatggatatgtaatctactttcagatatgcagttccctgtgccttaatgattaatgggaacgcacagaagatcacattcgggattccaattaccgttaccattgcaagatattttccaagcacaaccttccacagactgaccggagctgtcagaagcagctgatccgtcttatttttacgctcttctgaaaaactgcgcatcgtgatcagcggaatccctacgataaatacgatcagtgtacctgaaagcgtataggaaaagtatggatatccggctgtcaggttatatgccataaagtagattcctgtaaatgcaataagaaatgcaacaaacacgcatcccaccatagactgaaaataggagcgtacttctcttttataaatcgccagcatctttcatgtcctccgtttccttcttcttcgccttttctgcatattcttctgctgccctgtcgctctgcgtcagttccacaaagacatcttcaagacttacctgcagcggattcagtttcagcagtggctgatgattctgtgcaaatgcctgaaatactttctcacgtatatctgtatttttcttctcctgaatctgagcccatgtgattccattttccagatactttgtagaaatacttcgaattccatctactgtctcaagaattcttcgaacttcgcccgggcttgctttcgtctcgatctcaatcagatcagaatctcccagattccgttccaggttctccggtgtgtcacttgcgaccagttttcctttggaaataatcaaaatataatcgcagacttcacggacttccgccagaatatgagaactcaggatcaccgtatgtttcttcgcaagctgacggatcagttcacggatctctatgatctgttttggatcaagtccgacacttggttcatcaagaataataatctccggaaatccaagcactgcctgtgccagtccgactctctgacggtatcctttcgacagattcctgatcagacggttttccacttcccagatcttcaccatcttctctacttcattgatagactcttctcttttattcttagcgattcctttcaactccgctacaaattccagatattcacggactgtcatctccatatataacggtggcaattccggcagataaccaatctgctttttcgcctcctcaggttctttcagaatatcatgtccattaatcagtacttctccttcggtagcaccgaggtatcctgtcataatattcatcgttgttgattttcccgccccattcggtccaagaaagccgtagacatgcccttcctctattgtgaagttcaaatgatctactgctgtatgatttccatacttcttcacaagattctttacttctatcaaagtcttacctccctatatttcttccagtctatatctatgcagacaaaccgagatttttgacctttcaaaagtatcaggattctgtgaatgttttgtgttataaatgtgacagttctatttcttacaaaaagaacaaagcactctctgcattgttccatataagaaccaacacaaagaatgctccttttttacttttcgtattccttacaaaccagatctgcaatgatctgctgcccctgaaaatccggatgtactccgtctttctgcagatgagatgtcacagatgactgatacacatccgcaacttcataatcgtattttcccgcacgtttttcaatgatcgcgttcatattttcaataatgtcttctacaattttattcagcgtagatggaagcttcatatttcctgccggattataaattgtagtcacgatcacttttgcatcgtcctttttcaatgaatttactgtcttcatcatctggatccattctttttcaaaggaattataatcccagttgttcaacgcgttgatcgcactcagcacaagcagcggattcttctttacagactctttcaaagatgcaagtgcctcatccgcacttttaaattttgtatctgtcttcaggatttcctgaaccacacgcttacattcgttgagcaggtcattcgaaccaattgttataaaaataacatctgcttttgcaagatttgtctgcacatcctgctttgacaaatacttttcgttcaatcctgctgtatcaagacctgttcttgcataattgtgataaatatatctgcacccttcgctatatgctatttcctttgctgccagacttccataattctccatccaggatttatcgcaagtgtaacctttcgcaatactgtctccaagtactgtgcaataaagctgatgtgggcgtgccgtttcctccgtattttctgttccgaataccggaagagtctctgtcagcagcatccctgcgctgagcagaactgccaacatccttcttccgtatcttgaaatccttccttttctttctctcattccattttgtttcattttccgcacctgcctgtattctgtctttcttcgtagctgtccctattattgccttatacttttagatttcccattttgcctgacttccatgctccgtctttgtaatatttaatttccagtcaatctgctctttcaattcatttacatgggaaatgattccaaccagtcctttctctcctgcaagttctttgagaatctgaatcgcacggtctcttgatgcatcatccagagatccgaatccttcatctacaaacatcgtctccagactcactgctccggctgtattctggataatatctgcaagtcccaatgccattgataaggctgccatgaaggattctcctccggaaagagacttcacatctctgacagaatctgtcaccagatcatagacatccagatcaaggccggcctgtccctgactgctcagatcctgaatctccctgcactgtaaaataaattcatttgatgtcatccgcgccagcctgcggtttgccgcctgaatgatctgccggaaataagtccgctgtacatacgtctcaaaatcaagtttcacactgccgctcaaattgccatttgcagtcttgctcaggttggaaagtacctcatattcttttcgcagagcttcctgcgaagaaaaatattgtttcagatttttgtacgcattctggttacctgtccatctgctgtgaagctgcatctgatgatcctgtttttctttcaacagatgttctacttcatttcgcttttctatctcctgctgcggatcttcccgcttttcgcctgcagtctgttccttcagcgtctcgatctttgcctttttctctaacagctggcggtcatgttctttcacttctttgtctttctcccgccacccttcgatccactgtttcgcctcacggaattcttcctgtgaagtaaattcctgtcggctgatctcctctcggaactcttcctgctcttttacaaaacgcttctcaagttctgccttttggcctcgaagtccctccagttttcctgcctgacgtctgctttcctccgtcatcttacggcactgttcctgtgcctgctttgtttcattcttcttccgatccagttcaacctgcatcttctgaagctcttcttttacctgctcttctttcacaggattatctccgagaatacgttgttctgattcaagctgtgctttacatatctgaaacttttcctgctgctgtattcttttttgttccagcagatcacgtctttgcttcagtttctctaccgtctctttatccggtgcttctccggaaatctttgccggatgcggatgttctactgatccgcagaccggacatggaataccttcctgtaattcctttgccaggattcccgcctgctcctgaaagaatttcgcatatgcttcctcatactgagctgatgcttcctgacaattctgtatacatcgctgcattgcccctgtctgattttcatattctttcaaatacttacgcacatttgcgtaatgtggaagaagatccgataactgtgaaattcttttcagcatttccggttcttcctttgcaaaaacttcttccaattcttccgctttttctttaacctcagaaagttccttttcctgttccttctgccatacagtgatctgctcgatctcgccctgtatctgccgcacggatttcgctgttcgaagagcctgcacttccagatgtctcgcctgctctgcccggtgtccaagcactgcctgaacccgacaggtttccatctcttccttttttgcattcagaatactcagctgtttctcttccatttccaaacgatcaaatatcttattcttctcttctttcttctgaatcagcattcgaagtgtttctgactgtttcttaagttcctctgattctttctttaagacttttccacaactttcttcatattcgagaaagtttttcacagcctccagaaccttttccccttccggcatggataactcacagagttctttccactggtctgccagatcctgctgatctgtgtcctccgattccacacgctccatctcacgccgaatgtctgattcactttccttcagcgcaatatacagatctcttcctttttctttcagtgcttcctggatttgccagtagatttgtgtctgaaaaatctgcgagaatatcttttttcgttcttttgattctgcatgaagaagctttaagaaatctccctgcgcgatcatggcaatctgtgtaaactgtcccgcatcaagaccaatgatttcttgaatcttctggtctgtctctcgcttcttcccctgatattcccttccatccggaagaaggagacttaccttcgctgtctctttcacataccggaggcttccatctgcttttcttctcttccctacccggagatattccggattacggcgcacggtatattcctgtccccgataagaaaacacatattcaacataagtgtctgtgtcttctgatgcatactggctgcgcatcatatttccatctctgcgtccgccactcgtccggtcatacagcgcatacatgattgcatcaaagatggttgtttttcctgcacccgtatctccggtaatcagaaataatccgctgtgaatctttgtaaaatctatctcctggacgcccgcataagatccgaatgcggacatcttcaatctcaccggtctcatacgtcttcccctttcatttcacttagaatctctcttaagatcttttgttcctgctcagacatttcctgcccctgcatctctttgtagaaatcacaaaatgtttcaaacggagtaccgatccgtatctgttcttcagaaaattccagcttctgtcttgttctctcattatccatccgcacttctagaatatgatggaactttctttccaactgttccttcggtttgtacggatcaacctcatctgtcagcgttacactgacataatcttcactcccggttccgtcctccgcttcaaggatctcttccagcgttcccctaagttttctcacatcacgaagtggatgcagcggcaacttctggatttccggctcactccctttttctttcagttcaactacatgaagtgtcttcttgtggtttgcttcgctgactgaatatttcaacaatgttccgcagtagcggatcttctcctgtccgactctctgtgcaccatgtaaatgtccaagtgccacataatcaaactcctgcactgcggaaatatctacattatcaatgcctccgacagataatacttctgattcacatattgttggagtctcccccttccctgtataaaactgatgggagaccagtacatttcttctggaaaaatcaatcttctcccgttccagaattccttgtacagctgccgtataactctccggcacctctccgccaaagatcttgcgtacatatcccggttttaaaaacggaagcagccagaaatccgtttcaccaaactcatctgtcaaagtaatctttttcagaccatcctcttcttcctccggagcctggcccgcaatataaatctgatggcttccaagcaaacgactggcataatcaagccgctgtgccgaatcatgatttcccgatataataagaaccggaatcaccggttcaatcttagccagagctgtcaagaattcatcaaacaagctgactgcttctgccgacggcacggatttatcataaatgtctcctgcgataacaattgcatccggatgtatggacgctgcatatgaaagaacctccgcaaggatatgttcctgatcctcccggaggttatagtgatgtaattgctttcctatatgcaggtctgataaatgaaaaaatttcatatcgtcacctcattacagtaaatttacttctttcccggattcttccagatccagattgctgctacaataccaagcatatacagaatgttcacaagaacgaccggattatccttcagtaaagcgacaactgccacaattactgcaagtatcgctgcaagctgaagcaccttgagaaacttctcattccggctctgtcttgctttctgtaagcattccagtctgcgctgttccaacgtcagatattccagcatatcttccggccggatcttagaaagaatcacttcttctctggaaaacttcttctccccactgcggtggaaaatactcttgatctgatcgatcttttccttccggttctgcggatctttaaccacctgctcgtactcttcctcagctgcacgatcctccgcagtctctttgtaataatcttccagcttctgcgccggttctaccggtggctgtacaggatgtgttggttccgtattcaccggtggtatcgcctctgtcttcactggcggaatctcctccgcatccactggctgctcgactactcctgatgtattcacttcatctatcactttattttcctcagacacgctagtcctcctttttatcttctctgcatcaatcctgaaaatgatacctgctattcgcatatcaacatataaattatagcaaatgcacgaaaaatatacaaccaacaggaaatggacctggtgtcgattaatcacattttcattactactgttgctcctccgctcccggaagtttcaccatcttcggcgcatgcttcagcgccggaatgatctttgcgatcaaatctgatgtacgaatcttcagactggatgtattgatacacggatgacagccaaaatacggatctttcattacatcctcatcgatcagaagctgcactttcccctctgtatcattcataagtcccataacgctgacagatcccggtgtaatgtccagatacttctccatatactccggctttgcaaaggaaagtctggcagaacctatctgtgccgacagattctttgtcttgaatggcttgtcacccggcatcagaagcagataaaagtctgtttcctgtcgattgcaaaggaacaggttcttgcagattgcagttccatctccaagtgttctatcgatctcttcacaagcttccattgtcattgccgcctcgtgatcaactctttggtattccacgccaagcttgtcgaggaaatcatataccctgatttccttttctaatcttccttctgtgttttctggtcttccattctctaatttcatattatcaactcctatgtcatactaacctaagtgctctatatctgtcaaaacatgcaaatatttcctgtcttctcggcactgccatacaggatacactggatgtactctcacacaatgctgccagggatttattctgcatcacttcttccagctcatctacaatctgaattagattcttctttccgtcaatcaaatgtttctgtgcatatcgtacacagtatccaagtgctgtcacctgttcgctatccgcaatctgctctaagtatctcagatcgatcgtatccctgttgatcatcactgattcttttcccatcatcttcatcttgatcctgtcatttccgcgaaatgctttatccggtcgcggcactctgtcataagtcggtttctctgccggctgctccggcacgctgatctgtgggaaattctctgcttcttttttcgccagtactgtaatgtctttcggaacataacgatccatctgaataatactatccgcaatatgaaaataagctcccgaacttcctgcaacgatcactgtcgagatcccataattttcatacaattccctgattctttcaataaatggtgtgatcggttccatctctctgtggatcacgcgctgcatcagctcatcacggatcataaagttcgttgcactcgtatcttcatcaatcaggaacagagatgttcccgcctcaattccttcgatcacatttgccgcctgtgaagtacttccacttgcatcttctgtacagaatgatgtcgtatcttttccgttcggaagatcgttgatgaacatggaaatatctgtcttctggatacttcttccatcctccgcacgcaatttcactgctgtcgcatctgtgatcacatactctcttccatcccctgcgatgtgattgtacactccaagttccaatgctttcaaaagtgttgattttccgtgataacctccgccgacgatcaaggtaatccccttacggattcccataccggtaatctttcctttatgcggaagttccagtgtcacttcctgttccttcggagactggaaggcgattccgtcacgcatcggccgggatgagattccggattcccttggcagtacacttccgtttgccacgaaagcacacagaccacgtttcggaagctctttacggatgtactcctgatcttctgccagatctacgattcttctcaatctctttgcatccagattcttgtaaaacaaggatgcctttacacactccggaacaaaatcaaataaaatcttctctaactctctcgcattgattgttcgtccatttgccggaaatccgatttccattctaagaaggatatttccgttctccggctgaatctgacacgctgttctctccagaacttcctgtccgcatctgctgacagagatcagaccactcttacctgaacctttcgccttgaatgcaaaccgttctgcccttcttccaaactggcgcagcaattcgtcctgaagtgcaattctctgacattttccacaatataattcctgtgggaatcctgctgtcttcccactcaccagtacacttacctttgacggtgacgcaaacggatctccctgtacgtgatcgattgataaaacatatcccggaaatcggtactgtccttttgtatctttataagccggatatccccggtgatctattcttgataataaacttctaagttctgcttctgactgcatttttattccactctttctttttctcattcgtgcagaatacgctcaagctgcacgaaccacttctcattatacaataatttttgctttcttgcatgaaatagtcatgcagctttcccgattttcagagcaaaaagaagccattatccagactctttatccgaataatgacttccaatcatttacttcaaattacttttctgtaatgcaattttatacctcgaaaatcaggtctccgtaagatggcattggccaagcttctttatccacgatcatctcaagtttgtcaaccggtgcacggagtgcatccatagccggaacaacctctgtatgatagtatgtagcctgtacttcgccttcttcttttgctgctgcatctgctgttgtttttacaaggttatcaagtgctgcctttgtctcagccatcagagcacttacttctttcagagtctctgtctgaacagatgcgtcaacaccagctgcctttacagcatttactgtatctgcaagtgtctttgtatacttgataaatgccggcaggaactgtttgcttgccatatcgatcatagtacgggcttcaatattgattgccttagcatatgcctcatactggatctctgcacgggactcaagctctgcttttgtaaatacgctgaatctctcaaacaattctacagccttgtctgttgtgattgccggaattgcttcaaccatagacttaatgttcggaagtcctcttctctcagcctctgcaacccactcgtcagagtatccgtttccgttgaagatgattctctggttctctgtcaggtattctttgatcagatcatgtactgcaagatcaaagtcatctgccttctcaagaatatcacatgcatctgcaaatgcttctgcaacgattgtgttcagtacgatattcgggtttgcgatagaatctcttgatccaaccatacggaactcgaacttatttcctgtaaatgcgaacggtgatgttctgtttctgtctgttgcatctttgaacaaatccggaagtgtgcttacacctgtctccagctttccgcctttcagactgtgtgtagcttctcctgtactgatcaactgctcaacaacatcctcaagctgttctccaaggaagatagagataattgccggaggtgcctcgtttgctccaagtctgtggtcatttcccggatctgctgcggattctctaagcaggtctgcatgcttgttaaccgctttcaggatgcaggcaagtacaagaaggaactgtgtattctcgtgaggtgtcttacctggatcaagaaggttgattccgtcatctgttgtaatggaccagttgtcatgtttaccggatccgttaactcctgcgaacggtttctcgtgaagcaggcatttcagtccgtgctggcaggctactctcttcagtgtctgcattgtcagctggttctggtctaccgcaatgttcgcctctgtataaatcggagccagttcgtgctgtgccggtgcaacctcattatgctgtgtcttagccggaacaccaactttccaaagctgaatatttacatctctcatgaaggatgcgattctctgacggattgttccgaagtaatgatcatcaagctcctgtcctttcggaggcattgctccaaagagtgtacgtcctgtgtagatcaggtcttttctttcttcaaacttctctgcatctacaaggaagtactcctgctctgctccaacagatggagtaactttcttagatgttgtatttccaaataaacgaagaagtcttaatgcttctttgttgattgcttccatagaacgaagcagtggtgtcttctgatccagtgcctctcctgtgtaggagcagaatgctgttggaatgcaaagtgtagctccgcctgcgtcctgtcttacgaatgctggtgatgtacaatcccatgctgtatatcctcttgcctcgaatgttgctctcagtcctcctgacgggaatgaagatgcatccggctcacccttgatcaattcctttcctgagaaagtcatcagaacctttccgttcggaagtggagctgagataaaggaatcatgcttctctgctgtaactcctgtaagtggcaggaaccagtgtgtatagtgagtcgctcctttttcaatcgcccattctttcatctcgtgagcaataacatctgctgtctcgagatccaggtcttttccttcttcaattgtctttctcagattcttgtaaactttctttggcagacgctcctgcataactgtatcattaaatacattttctccaaagatgtcagctacattgaataattctgtgctcataccctataccttccttttctcttaattcttcaattaccgttcactgcaatgaacaatattcgattacactacgggaacccccataatagattacctctcaggaaatcatccgtctgatccagtcagatcagatctgattttattccatccaatctgattcaatcatgcggatcatttcccaagcgataaaaaaagggcactccaattataattggaacgcccttgttctgtctacgtgagtcagtatacctcaacttgctttaaaacgcaagtgcttttttaaaaaagttcttctcaggcttttccgacagatccgaataactccatcttctcttttactgtttccatgattgcgtctgcacctggtttgagaagtttacgtgggtcaaatcctttaccctcaagatcttttcctgcttcgatgtacttacgtgtagcatctgcgaaagaaagctgacactctgtattaacgttgatcttagcaactccaagagagattgctttcttgatcatatcttccgggatacctgtaccaccgtgaagtacgagtggcattgctcctgtacgctgctgaatagcatccagagtctcaaagcttaatccttcccaatttgccggatatttaccatgaatgttaccgatacctgctgccaggaaatcgattcccagatcagctactctcttacactcttccggatcagcgcactcacctcttccgataactccatcttcttctccaccgatggatccaacctctgcctcgattgacattccgtgctcgtgagcaatcttaacgagttcttttgtcttctcaacgttctcgtcgatcggataatgagatccgtcaaacatgattgatgagaatcctgcttctacacatttcaggcatccttcgtagctgccgtggtcaagatgaagagcaaccggaactgtgattccgagttcttccatcattccgtttaccatacctacaacagtcttatatcctgtcatgtactttcctgcaccctcagatacaccaaggataactggtgagttgagttcctgtgctgttgtaagaatagcctttgtccactcaagattgttgatgttgaactgtcctactgcgtagtgacctgcttttgctttctgaagcatttctgtagctgatactaacatatttctttcctccaattcttaaagatcctgacacccgtgaaaatcatcaggaattatttatttagaattcttctatattatagcgtattaatttataaatgacaatcttatgttttgcataaaaaacaatccacagcggtgaatcttgttaacattttcacaatggctttccttttcttctgtggattgtttttatttttgtacaatataaccaacgattatttatcactcgctaaagattaacaagtctccattttgaattatcaacagtaagctggtatccacagtaggaacaacaaccatttttatcaggcatgaaattagccccacagcttggacattctttttcactgaaaactgcctgaccttttgacttcattcgtcttggatggcgtgctctgtataatttcgattccatctttttatcctgttttataatcttctggttcttttcgagaataagtttgtggagtactgcctggatcgtgatcgttgtctgggtttccgtattatctacagctttcagttgtaatttgtccacactgtaaaataatgcatcagatgtcagttctgcatcattaagagcttcattgaggtctacaagtaatactttttcatcataacgaacgatctgttcttctaatccttctgtactattcttgcttcttagtagcactgctccgagaataacagctaatataactgtaagtacaaaaggaactgccaatatgatctcaacgctttggataaatcgaaaacaaggaactgccggaagaaagaaaaccaggagtgttgctgctaccattttatagttataatcattgggatttaaatcctgatagatcagaaactcttctatctgccagtcgaagaaatcgcttttgatatatccaccacaataaggacaatgaacttcattactatttaatgaaatctcagcgccacagcttggacacatgattttctgatattcagaataaaattgttgctcttcatttctgtttttgctttcaacttcatcatgacggatatgcctggattgtctaagtaagattgcaccatgtgggaaaaagtcctcatacatgatttttccactttttttattacgatatcggtttgatacggtaccttgcagtatggcctctctccattcacgtccggcatcattccaatgtttgaaatcatgattctttttgtttgcttctggcagtttcgcgtaagctatacgaatttcatgagttatgtcattcgcctgtaaaagtttcatctcatgttcgattttctggcgatatgactgacctatgttcaccgaagaattttgaatattaccgtcttctaatgcagataatactgtttcaaaagggttaagtaccttttgagaaatcttcgttgctttgaaaaagatcgactttgatttatttaattttttcttgacgtaaagaaaccacagttttggctgcatccattcaattttccaatccaaaacatagcaggtgagggctccggcccacacacttgcccacaaaaatgcaaaaaatattgaatctccccaggaaaaattcatttgatcacctcgcattctttttttcaaacagattcttaatacaccaaagaccaatgaatataaaaagtgcgcccacaggaataagtatacaagcaaaaaagaatgtaaatggatcactgtcgcctcttaatttgtagtcaccctgtgatgcaattatggtatttctaaattcctttgtttcgtttgatttatgacccatatgcaatcctcccttcaattttccccattttatcaacattactttttatttataatactggaaaaacagcaagattacactatcacttgtgctaggaatatttctaataaaatgattggccatgatttactaaaagattttcaaaacaaaaaaagctcgtaaatacgagcttctttcagtgactccgaggggaatcgaacccctgattccagcgtgagaggctagcgtcttgaccgcttgaccacggagccttattcattttcgtctgtgtcttttttgttaccgccacaagacaatagttattatataccaggatttcagaaaatgcaaccccttttttaaatttttttcaaaaaatttttatttctatttcaaactgccgttttttcttgattttacgcggttttccgcgattgttcaataaacctaaaattcaaaaaaggggtgattttctaaaatatcactgaaaatatttcagattatgtgttcagacttcatctgcttccactaactgttcactcagatcttctacggcttcttccttaaccatgatctgaagtgcctgattcttattctgaatcacaacttcttcatgagtaccgccgtactctccatccagagtccatggaattgcctcaacagattcaaaacggacttcaccactcttgaaggagtatattctgtctgaattaatctgacgcatcacaactgccccaatcagttcgttcaactcgactggattctttggtgttttaaagagtgtcacctcaaaaacgccatcatcaaaaataacattttctcctgtgattcttttgaatcctcctacagaacgtgaatttgtcaccattccaaagataaactcatcttcaatcgtctctccgtcatgtgtgactttgatcttataagacggaatattgaacagtctcttggttccttccagaatataagccatatgaccaagaatattcttcatactctgcttcgtctcatatgacacatctgtgaaaataccaaaggctgcaatatatacgaagtagtcatcgttaaactgaccgatatcaaaggaaaatggtgttcctgttacaattgtatctgcggcctccagcatattcttggaaatatgcagactacttgcaaaatcattcgttgttccggccggaatatatccgatcggcgtcttattttctcgcatcatcataccggtcacgacttcatccaatgtaccatctccgccactacatgccacgagatcatattcttctttgtactcactgacttttcttacagcatcctgacttctttgtgtaggataaaccgtcacctcatatccgcccttcacaaatgtgtcgatcacatctgaaagtttcggcttcagaagtcccattcctgaattcggattgtaaacaaatagcattcttttcataaacaaatacctccttattcaaaaatcatttgtgttcacatcagctgcaaactctcccccatagaaaaagatggctgtactcctcttcaaagtacagcccctctatattcatttgtaatcacatggttatctctctgtgacttcaattaccatcttattgttattatacattagcaaagaatgtcttaatgccttcagctgctttctgctcgtcctcaccgtctgtcacaacggtaatctcctcgcctccgatcagattcagactcatcatacccataatactcttggcattgatgttcttctcggctacctgaatgtacactttgctcgcatactggctggcttcctgtacgagaagggcgatcggccgtccatcaaaccctgggtctgctttcactacaacagatgtcttaatcataataatcctccttgttcttgccgaactttgtctgccatctcactcagcttacgcagtctgtggttgatacccgattttccaaccggaggattcagggattctcccagttccttcaatgttgcttccggatgctcgaggcgggcaagagcggcctcgactaatcctttcggtatattctcaaatcctatctgatctctcaaatatgtaatatcttccagctgtttcactgctgctgatactgtcttattaatattggcagtttcacaattcacttttctgttcacagaatttctcatctccttgagaattcttacattctcaagttccattaatgagacatgtgcctccatgatattcagaatatctactatctgtgctccttctttcaggtaaacaacatacgacttttttctgagcacgatctttgcgtccatagaaaaactgcagatcagatcacagatctgatgtgccatctcttctgtggaacagacaatctcaaaatgatatgccttgttcggatcactcatagatccggacgcctgaaacgttccgcggagaaatgctcttcgacaacaaacctgttggacaatcatcggattcacggcatgcaactcttccgcattctcctgctgttcccctatcatcttcgtagcctgtaagatacgtatcgcatcttcatgcttttttacgataacagaataggtctctgtctgcttctttatatttctccgaacggaaatatcactccttatattaaatgttttttctattaatgtaaagacctttcttgcaactaaaatgttttctgtacgaatcttgatactgcaccggtcaaaactattgattacaaccgtcccgcacatgccaataaaagccgtcaattccgcaatctggcaatgtctggctgaactgatgttccttgcaagctcttccttcacttttccagaaaatgacatattttccaccttttactttctctttgtgatactatccttcccaatatcacgatgttcaatacggacgccataactttcctctgtctcaagcgtgtgatataacgcatttgccagcgttacagatctatgcttcccaccggtacatccaattgcgatcacaagctggttttttccctccaaaatataatttggaatcagaaattcaaccatgtcttttaatttttcaaggaaaatcggtcccttgtcattctgcatgacataatcctggacttccggatcatttcctgttttttctttcaatgtatcaatatagtacggattcggaagaaaacgcacatcgaatacaaggtctgcgtcctgcggaattccgtatttaaaaccaaaggacattactgtgatatagaggttgcaaaaactctctcctttcacaaaaatcttctcaagttcaatcttcagttctcttgtcagcatcttacttgtatcaagaatatacgttgccttcattttcaaaaatgcggtcttctcacgttctttcgcaataccggtatccacacgtcccgacccactcagagggtgctgtcttctcgtttctttgtatcgctttacaagtacagaatcctttgcgtccagaaacagaatctcatatttgattcccttttcatccatttgctcaaggtctttctctaatccagaaatatcctgtccgcttcgcacatcgactcccaatgccactttcttcattgaagtttctgaattctcaatcatctgcacaaatccaggaaacattgcgatcggcagattgtccacacagaaatatcccatatcctcaagcatcttaagtgctgttgattttcccgctcctgacatccctgttacgataacaaaacgcatatcaaaactctcctattcttcttacttccgcttccagacggactcctgaattttcttctactttatcttctacctgacgcatcagttccataacctctgctgcgcttgcattccctctgttgatcacgaaaccgcaatgcttttcagagacctgtgcatctccgaccctgaatccgcgaagtcctgcatcttcaatcagttttcctgcgaaatatccttccggacgcttaaatgtacttcctgcacttgcatactctaatggctgctttgtcactcttttttctttcagatcatccatcacttctttgatcttctccggatttcctttttcaagagaaatcactgcttcaagaacaatataattcttctgttctaccacacttgtccgataagcaaaccccatctcttctaccgggatcgtgagaaattctccatctgctgtcatcacttccacactctcaagtacctgcttcatctctccaccgtatgcacctgcattcatgcgaacggctccgcctaatgttcccggaattcctgctgcaaactcaaagcctgtcagagattctgacagtgctgttgccgcaaccttcgacagaagtgcgcctgctccggcataaatcttattctcttctaccctgatctgattcattttcttaaaaatctgaaggattacgccacgatatcccttatctccaacaagaagattacttccgtttccgatcacggaatatgggatttcctcttttttgcataactcaacgattgcctggatctcttcctttgattcaggtgtcacgaaataatctgccggaccaccaatacgaaatgttgtatgtttcttcatcggctcatctttcattacattttcctgttttgtaatagtgcacaatctattgtacaattccatatctatactccgtttcttctatataatagtattaaatattcttatcagtcatcaacatcatacaccacccacttcataaagtaaagtatattgccttgccaaacactaataaaccatgtataatgaatgcgtatatctaaaattaaccaagcctatttggaggcacattttttaatcaaaggagtgaatatttaaagtggacgcaggtgacacgtacctattaattatactgttaattttactattgttttcatcatttttttcatcaaccgagactgcgctgatgtcagtgaataaaattaaactccgctctctcgcagacggtgggaacaagcgggcagctttggctcttgatatcacagagaatcacacagcgaagatgctcagtgcgatcctgattggtaataacattgtgaatgtttcagcatcttctcttgctacaacccttgcctattcatttggtggatacatggtcagcattgctacactgattctgacagtggcaatccttgtatttggagagattacaccgaagaattatgcaacgatcaacgctgagaagcttacccttcgctatattccggtcatcaagtttttcatgacggtcatgactcctgtcattttcatcattaacttgttttcccgcggaatcatgctgatccttcgcgtagatccggatgcggcgaataaagctatgacagaagaagaacttcgtaccattgtggatgtcagccatgaagatggtgtaatcgagtctgatgaaaaagagatgatctacaacgtattcgatctcggcgatgccaaggcgaaagacattatggttcctcgcgtacatgttacatttgctgatgtcaatagtaccttcgatgaattaattgatattttccgtgaagacaaattcacaagacttcctgtttacgaagagacgcaggataatgttgtcggtattattaacatgaaggatctacttctttacgatcatgatacaccgttcaatatccgggatttcttaagaaaacctcatttcacttatgagttcaaagatatctctgaacttcttgtagagatgagagattctacttttaatattgcaattgttctggatgagtacggtgagatggcaggactcatcactttggaagatattctggaagagattgttggtgagatccatgatgaatatgatgagaatgaagatgaactgatcaaagagatttctgatcatgaatatattatcgaaggctccatgagtcttgatgatgtgaacgatcacttacatacagaacttaactctgaagattatgattctctcggtggactgatcatcgaacatctggaccgtttacctcagatgggtgatgaagttgtcactgaagatggaattcgtctggtggtcgagaagttggataagaaccgcgtagaaacggtacatgtttatcttcctgaaagagcagatacagaggaagaagcggatgaagagaattcagatccttctgaaactgacaaacactcacatgaatagaactttttgaaatgtcggctgcattatcgcagccggcattttttgacgtttcacaggcaatgcgcgctttcatataatatatagaagcacaaaataatgaggtgattatatgtcttattctatcatgcttgatgcaggtcatggcggtcgtgaccccggagctgtctataacggccgccgggaaaaggatgacaccttatctttaacgcttgctatcggagaactgctgcaggaacgtggaattgatgtactctatacacgtacaacagacatttatgaatctccctatcagaaagcattggaagcaaatgcagccggtgcagacttctttctgtctattcaccgtaattcttatccgacagataataccgtatccggcgtagaatctctggtttacaacaaatccggtctgaagtacacaatggctcaaaatattaatgaaggcctggaagctctcggcttcatcaatctcggcgtaaaagaacgccccggtctggtcgttctgcgccgtacacagatgccggcggttcttgtagaagtcggatttatcaactctgacactgataaccggctctttgatgataactttgatgatattgcgcttgcgattgctgagggaatccttgatacattagaagaaaacggagaaatcagcaatgcttcttctctccctcactatgcagtgcagaccggggctttccgcagtgaacgatatgcccgacgactcctgaatgaattaactgaattgaattttcctgctgttttgacagaaggggatggtttattccgggtaacggtcggagaatatgatacgcttgacgaagctgtaaaaatggaacgccggttgaagcgtgccggatatcagacagttattgtaactatttagttgcaggatttagattctgactattacatgtccgtaaaaacattttcaaaaaacagagcgcactcttgattttttcaattgacggtattataatagcgttaattagaaatcatacggtctttcgccgcataaaggaatggaggatttactacaatggagaaaaaaaacattgactgggaaaatatcggattcggatatatccctacagataagcgttttgtagctaattataaagatggagcatgggatgaaggtggtctcacagaagatcctaacatcgtcatgaatgaatgtgccggagttcttcagtatgcacagacagtatttgaaggaatgaaggcttacacaacagaggatggacacattgtcactttccgtccggacctcaatgcgaagcgtatggtcgactcagcgaaacgtcttgagatgccgcctttcccagaagataaattcgttgatgctattgttcagacagtaaaagcaaatgaagcttacgttccaccttacggaacgggagcaacactttatatcagaccttatatgttcggaatcaatcctgtaattggtgtaaaaccggctactgactatcagttccgtgtatttgccactccggttggaccgtacttcaagggcggcgtgaaaccactgacactgtgcgtatcagactttgaccgcgccgcaccgcatggaacaggacacatcaaagccggactgaactatgcaatgagtcttcacgcaattgttacagctcacgcaaatggttttgatgaaaatatgtaccttgactccgctacaagaacaaaagttgaggaaacaggtggagcaaacttcctgttcgtaacaaaagataacactgtagttacaccacactccacaacaattcttccgtctatcacaagacgttctctgatgtatgttgctgaacattatctcggactgaaagtagaagaaagagatgtttactttgatgaagtaaaagatttcgctgaatgtggtctgtgcggaacagctgctgtcatctcgccggttggtaagattgtcaaccacggagaagagatctgcttcccaagtggaatggaacagatgggacctacaatcgcaaaacttcgcgatacactgacaggtatccagatgggacgtatcgaagcaccggaaggatggctgaaatatatcgactgattttaaaaaaggacatcctgcagaaacttaattctgcaggatgtccttttcatagctgttatccaacaactctgttccattcttaattatttactcgcaaagtccttcgctttcgatcactttcactacgctgtctacatacttctcacagatctcgtcagaagctgcttctaccataacacggattaccggctctgttccactctcgcgaacaagaatacgtccgtctgttccgagttcttcagctgttttctctactgccgcctgaactgctgcgttatccagtgctgtcttcttatcctttacacgaacattcttcagaagctgtgggaagatcttcacttcatctgcaagtgttccaagtgtctgcttcttctcaatgatcgcttccataaccataagagatgtcaggataccatctcctgtacgtgcatgcttgctgaagatgatgtgtccggactgctctccaccaagaacatatccgttcttaagcatattctcataaacgtacttgtcaccaactgctgtctgctcatacttcataccaatcttatcgcatgctttataaagtcccaggttagacataattgttgtaacaactgtattgtctttcagttttccctgctccatgagatatttaccacatacatacataatgcggtctccgtctacaacatttccattctcatcaactgcgatacatctgtcagcatctccgtcataagcaaatccaatatccagatgtttctcttttacatactcctgcagaacttcgatatgtgtagaaccacagtttgtattaatattcacaccatttggctcattgttgattacataagtctttgctccaagtgcatcgaatacactctttgcaacacttgacgcactaccattcgcacagtcaagtccaactctcatatccttgaaggaacgtgttgcaagagaaatcagatgaccgatataacggtttcttcctgctgcatagtcaactgtgcggccaatgctctcttttgttgccagtgggatctcatcaatctccccatcgatataagcctcgatctttgcctcaacctcagcctccatcttatggccttcgctgttgattaccttgataccattatcatagtatggattgtggctcgctgaaatcataagtccgcagtcaaaatcttctgttcttactacatatgaaacacttggtgtagttgtcacatgaagaaggtaagcgtcagctcctgatgctgtcaatcctgctgcaagtgcatactcaaacatataactgcttcttcttgtgtcttttccgattacgattctggccttgtggtcctgtccgaaataccatccaagataacgtcctactttaaatgcatgctctactgtaagaactacattcgcctcaccacggaaaccatctgttccaaaatattttcccataataatcttccttttctttcttgtgatacccttttgttatcagatctattcacaaatttactaccgtaaaacatgttttcattatataaaacatgctttacaagttattcctattatattacctttataaatcagatacaagcttttttctcttaacattcttcttcatgttactgttcacactgtgtgcgaccagcaacgcatctcgccattttaaattgcctttggcgatggggcgagatgcattcaaaccaaaacatgcatcctccgtgtcaatcagcggagtgattgacacgggagtgaacaataacctcttcatgtctttaaaaacatacactgtttcctcttctcagtgtccctttttctatgctatacttgaaaggttatgttttatagttatcataaaagaaaggattgatctatcaaatgaattcattgaagccgatgttacttacatcattaaagagctacaatcgttctcagttcatcaaagacgtgactgccggaatcattgtagcaattattgcattgccgctgtcaatcgcactggcacttgcatccggtgtaggaccggaagctggtatcttcactgcaatcgttgccggatttgtcatctctgcacttggcggaagcagtgtacagattgccggaccaacagctgcattcgcaacaatcgtcgccggcattgttgccaaagacggaatggatggacttgtcattgcgacaatcctcgccggtatctttctggttctgatgggactgtgccatttcggaagtctgatcaaattcatcccatttacgatcacaaccggattcacttccggaattgctgttacaattgtaatcggacagctgaaagatttcttcggacttacctatccggatggggtaaaaccgatcgagacaacagagaaattccgtgctgttgttgaaaacttctctacaattaatattgatgcactgattgtcggtgcagtaagtcttgctgttctgatcattgctccatacatcttcaaaagaatccctggatctttgatcgcagttatcattggaatcctgatggttcagttcctgccgttaaaagtttctacaattggaaatctttatacgatcagcaactcactcccatccttccatcttccagctgtatcatttgaagttgttcaaaatgcacttccgaacgcatttacaattgctgttctcgcagcgattgaatctctgctttcctgtgttgtcgcagacggaatgatcaacggtaaacaccgttccgacatggaacttgtagcccagggagccggcaacattgcttctgcccttttcggcggaatccctgcgacaggagctattgcaagaactgctgcaaatattaaaaacggcggacgtactccgattgccggaatcgttcattccattacactggtcattgtacttgtcgtactgatgccatatgccggaatgattccaatgccaacaatcgcagcaatcctgtttatcgttgcatataatatgtgccagtggcgtacctttgtaaaactggtcaagactgctccaaagagtgatatcattgtactttttgcttcctttatcctgacagtactcttcgacctggtcgtagcaattgagattggtatggttcttgcctgcctgctctttatcaagcgtatgagcgaagaaacacacgtcaacagctggacttatgtggatgatgataccccggatgtcgatgaacgccttcagaaacttccacttcagatccgtgtctacgaaatctcaggacctctgttcttcggagcagcaagtgcgattgaacacattgtcgtaaaagattttactacctgcctcgttcttcgtatgcgaagcgttcctgcactggacagtactgctatgaatgctttggttgatctggtagaagtctgtgagtcaaagggaattacggttgtcttctcccacgttaacgaacagccaatgaaagttatggagaaagccggattcacagaactggttggaaaagagaacttccagccgaatatcagcgctgcactgaaacgtgcagaagaagtgattgcgaaataactttcttgattctttcgaaagatgatgttaaactttttttgcgtaaacagagtttgaaaaatcaggaggattttacatatgatcaaattaatcgcaagcgaccttgatggtacgcttcttcataacggagcacagaaactgactcctcgtgccatagagctgattcatgaactgacacaaaaaggcattcactttgttgctgcaagcggacgccagtatgataatgagcgcagactgttttctgagattaaggacgagatttcctatatcggagaaaatggttccatctgtattcatcagggaaaggtaatctctcgcggaataattgcagatgaccttgcctgccgcattatagatgaagtgaaaaaatcaccgaattttgatattctcatctccagagaagatgcttgtctgattgaagataatcatgaagcttttgtaaatcatattgtaaatatcatgcagaacacaacaaaaattgtagacgacctaagcaaaatcgaaggtccatttctcaagattgcaatctgtaatatgattgatgacacaaaagtaatcatgcaatatttagaacacttacaggaaatgttcggtgcagagattaaggttgttacttccggaaatatctggattgacttcattgctccgggaacaaataaaggtgctgctctttctaacctgatgaaattattccatgtaaagccggaagaatgtatggcattcggagatcagtataatgatctggaaatgcttgaactggtcggtcatagctacgcaatgtcaaacagtgcacccggtgtatcctactatgcggatgaagtaactgattctgttgaggatgttctggaagatgtcctggcaagtcttgataagtaaatatcacctgcgaacgttacttgttcgcaacaaaaaactcccgaatgttcacagaaatttctgtaggaacatccgggagtttttctattctatctcttcttttatatttcttctttaaattccagaactgcatatggttttgcctgttcgtcacagagttccacaacgattctgtctgcttctttactcagcttcgggtagatcatatcccccagtacagctgcctttttatactctacacgcaactgtgcaatctgaagatcatccggaagaaattccaatgccatctgcacatactgacagttgttcacatgctcatttgtgtcaatatgatactttctgaccggaaatgcttccagatcatctgtctcttccggaagtcggatttttcttccctcatatggtatatcaagtggttcttctactccatacaactgaacatcctttggctgcggcctggttggtcttcctgtctctgtatcaataaatgcccagactgaattcgcacaggcgagatattttccatctgcatctttcatataaaagtttctgtttccaaacaatcccttgaattctgttgcaaatgttccgattgtgatcttctcaccaagctccggtttccgattcaggatcacctgccagtaagataaaagccacgctcttttctcttccttcagaactgttgtaccaattccaagatcctccgactggaaggtactgcagtcctgaaaataattgatcaacgccggaactgtcatcgtaccgtggtgatctacctcgctgtaacgtactctgctgtcaaattcatacattttcttaacctcttttatttcttatttccaaaaataccagccaatcttaaactttgtattcgctgtcactttggaatattcttcttccgtcagtacctgttttaattgcttctttcctttgtcaggaaccaccgcattcgttgtatccaaaaagcagagattcggataaagcacgcaccaccagttatgtccctctgcactccccagttccacccgcagtgcctgataatttcccgcaggaaatgtcacatcaccgtaagtcctgtcaggaaagtaacaggttgttacagccacattcacactctgatcttctcctgccgccgcaactgtcttttctccgattgcacggatctcatctgtatgtgtacgtgcccactgcactgtctgcttaagacactgtttctcttccggttcttctgacaattcttctttcatataatccaatactgcatctcttacctgcaatttcagattctggtccttttcgctgtcactattcgctaacacatggaagcgaaacacttcctgcgccagatgcttctgcgtttcttcctgtgcatataattcctgttttgtatatatcattcctgtgaagaaagcagcgatcagaagtcccgctgccactgaaaaaatcactgctcttcccggcagtttttcttctcggacagacttaagctttcttctgagcaatgcaaaccgtttcttcataatatcatcctccatctatgataaagttactgttcacacgatgtgcgaccagcaacgcatctcgccattttaaatcgcctttggcgatggggcgagatgcatttaagccaaaacatgcatcctccgtgtcaatcagcggagtgattgacacgggagtgaacagtaacatgataaatcaattctgttcatacatggagtctttccacaaaaacgaattccatacatatagaataaagaatgtgccgaggcacattctttattttttaagcattttcttctttctcacggatagtgccgacaaccgtttctgcctggttcttaatatgctggcttgtaaactttgtagccagctctttatcatgtccggcaatcgcatcaataattgtctgatgctcattcaacagctgtgggtagcattctttcttctttaaatattcaattctgtatctgtacatctgttcgcgcagattattcagaagctggatcagtctgcggttatctgttgcagcatagataatatcatgaaatgcaacgtctgcctgtgcgatctgtgtaatatcatcactgttgagaatagactcaaatgtctccgctgctgcacgaagctcacgcactccttcttcatccattctgtcacacgcaagctgtactgcaagctcttctaacgcacagcgcacttccagcacatctcttagattcttctctgtgatctctgcaacttccgcaccttttctcggaatcataagtacaagcccttccagttcaagcttacggattgcttcacggatcggggttctgctcactccgagtttgttcgccagctgaatctccatcagacgctcccccggcttcagttctccacgcaggatcgcctgtctcaatgtattaaataccacatctctcagaggcagatactcgttcattgttacttcaaaatcagttcccattttacttcctcctaacgttgtgtatattcgttacgtatgcctgtcttgtcagacctttgtcccgaatcatcctctgtgcttctcttgctgatgcccggttttcaaacagaccaaacacagtcggtccacttccgctcatcattgccccgattgctccgcaatcctgcatcaccttcttgatatccgcgatcaccggatgcatcggtattgttacatcctctaacacattccccatagaatctgcgaccttgtgaagatctcccttccgaagtccttccaggatcccgtcaatatctggatgctcgacaatctctttggagtccagtgcttcatacaccatcttcgtcgaaacactgatcggaggcttggcgatcagtaccgtacatttcggcatggcaggaaggacacttaattcttctcctatcccttctgcaagaacggttcctctcatgatacaataaggaacatctgctccaagcttcacgccccgatccatcaattcctgctgggtcagacgcagtccgaagagccggttcattccaaacagaaccgcagctgcattcgagcttcctcctgcaagaccggcagctaccggaatgtgcttattcagcgtgatctgaaccccttctttcagatcaaattcatccatcagaagctgcgctgctttataagcgatattgccatccccggttggaagaaacttcagatttgttgtcagtgtaattccaggttctttcttcttcgcaatcttcacttcatcatacagataaatagactgcatgaccattctgacatcatggtatccattctcgcgtcttccaagcacatccaggcctaaattaatcttggcaagtgcttttaattcaatttgattcatcctgtgtacctccatcgctgttttctaaagaaccagatgtgaaaatttacacaaatgtatcttgtatacatagtacttacagtatactcatattttctttaaaaatcaacaatttatcccctattttcacattttcattttccaattcgtttacattcataatcccctcaactgtagtcatatactgtttcgccaactcccagagatcttctttctcctgcacaatatgaccaacgattcccggcctcttatccatctgttcaagatccagcggtttctccatgacagacacgattgtctgaagttctacctcccgccgtaagaatgcatcaaatgcaagaattgctctcacttctacagcctcactgcctgccatagacacctggatctgatccacatgatgactcatcgtacaccgtacattttccggaagattggaacattcgatcagatgttggaatggtatcatcccctgccagcttccatatggtcttgcatcatcccctctcaggtagagaaagttaagatgcaggattccttctatttggattccttcttctctatactccgtatgttctatctggatttcccctctgctgcagagtacttgaagtacatcatcttttaattctggaagtgaaagccgttccgttagtttatatctggattggttctgcattaaaagctcttcaaaaaccgtctcctgtttctccggaatacactgctcttgcaaagaataaatatcttctaacaactccatctcctgctcttcgtaaaagttcatccgcagcagtaatgtcccttcaatcccaaggatccgcatctcaccgtcctcatccatacggatatcaaccagtgtatcctccagcgtatgttccacagaataaaacattccttctgtcaagccattgcaaagaagttttccttcatatggaatcacctggctgacccagtctgccttcgattcttctgacagatagagacagaacacctgtagttctcctctgactgtcacctcatctgtccccggacgcagttctaactttctaccgctcacttcggacaacagaatctggctgatactctccttcgttcccggtaatgtaatctcttcttttattctataagtgtctttttttgtgtctgacaatccaagcagacggaactttttcatttttttataaacagcatgctcactttccacatcttccgtgacttcttcacttatcatctgagttcttccaatttcaagttctgtcagcagatgcaggctcagctttctagaatgcaccattgatacactgaactctgttctgagatttttcagaaaatattcttcctctcccggttgttctacatataccatttcttcaaatggaagctttccttctaaaactgccggttgcggatccagagaagctgtcatgtacaaaatcttaaatagagcttttccactgattttcagataattctctacaagcttcatatcttccgtcttcacacagactgtcccttcaattacatttcccacatcctccttcgcatccggaacgttatagtcttcgtccagctgaaactgatcgtaaatacattttccctcatgcatcaggcgtatcgctctcttcacaatttccatcctgctcctcctcaatcaaacataacctctttttctgtttcactgatttccacgactatgtatggaaatgtcgtgatttctttcgtctcttcaccagttgccggtcccatcagacttgtattcaaacaaactgcatgctccgtttcataaagtttcttcacctcaatagtatatcctgttgtcggacatgcaccgtatccttctgcaagatacgtctttccctgatccgaataaacaaaatgaaatgctttcttttttaactgaccgagcacttctgtcatttcctctggaagatgctcctggtcgatcagaatatattccagatcttttcgtttttgctctttctcaatcctggtaatacatccgcttataaaaaaacagacacacagtagaaacacagctaaaatgcccttttgttttttatttttcattacaatattccagatactgtaaacagtaacgccatccggtttttttatttcccttcaatctatgcatcagttgtattttttatgctgctacggtataataaagctacatgcgccagtagttattttatattatggcgactctattattcttaagataaagaaaggatattatatgtttcgatttatttttgttgcaatttttctaattctttacctaattctttctattcctgttttctttgtggaatggctgatcggtaaattcaacctacatgcgcgtgacatcagttctctgcgtattgtccagtggggatttaaagtgattttgaaaatgaccggtgtgaaagttactgtgatcggtgaggagaatgtaccggatgaacctgttctctttatcggaaaccaccgcagcttctttgacattctgctcacttacagcagatgcaggaatcttacaggttatgtggcaaagaaagagatggaaaagattccgcttctttctacctggatgcgttttgtctattgtcttttccttgatcgtgagaatccgaaggaaggtttaaagacaatcctgcaggcaatcgattatgtaaagaacggtatctctatctgtatcttccctgaaggtacaagaaataaaggtgaagaattaagtcttcttcctttcaaagaaggtgctttcaagattgccacaaagaccggctgtccgatcgtaccgatttctatgaataatactgctgaaattttcgaaaatcattttccaaagatcaagaaaacacatgttgttctcgaatacggtactccgatctatccaaatgaactggataaggatgtcaaaaaacatatcggaagttatgtagagaatattgttaatgagacaattcataagaatgcggaattgcttaagaactaaatttgcatttttgcaattcctctcagtgacatgctatattatgttaaaaatcagatctgtataatcgaagtgggaattatctgaaaacaactcgtcagacaattcccacttttcattattccggatatacaagatgacggtcattcaccaatgcatctttgtatttcttaatataatacttcgccatatcaaggttctgctcctgatagttgccacactgctccggtgctgctccaggaatctctccttcaaatccgataatgaaatcacacatctcaagaaccagatcaagaacatcctctgaatccagattaccgaacattacaagataacatcctgttctgcagcccattggtccaaagtagatcatgtcatccttcttctcactgttacgaagataagttgctgccagatgctcaatcgtatgaagtgccggagtatccacaaccggctctctgttcggtgctgtgattctcagatcaaatgttgttgtgacacaatctccttttgcgtctcttcttgagacatacaatcccggcatcagatccaggtggttgattgtaaagcttgcaattctatccatggtaaattctcctttttcaacttttcatttttaaccagtataacacagattaacagtgacaactagcttaaacgagcgacagctcatcaatcttgcggagttcttcttctgtaaattctgtattctgtattgccttgatattatccaatatctgttccggttttgatgcgcctacaagaacgcttgttacaataccatccttcaaaatccaactcaatgccatctctgccaatgtctgacctcttccggctgctagtccgttcaattctctgattttcacaagtttttcttctgtcagagcagatttcttcaggaaacgtccgtctgtcataattctgctgtcttccgggattcctttcagataacggtcggtaagaagtccctgcgccagcggactgaatgcaataattcccttctccagcttcttcgcagtgtctttcaatccatttttctcaattgttctgtcaaagatagaatatctgttctgattgatcacaaatggacacttcaagtctcttaagattgcctctgccttttccaatgttggaccgtcataatttgaaagccccacataaagtgcttttcctgactgcactgcacttgcaagtgctcccatcgtctcttccaacggagtctccggatccatccggtgatgatagaagatatctacataatccagccccatacgcttcagactctgatccagactagaaagaagatatttcctgcttccccagtttccataagggccttcccacatatcaaaaccggcctttgtgctgatcagaagctcatctctatacacgccaagttcttctttcagaatcttaccaaaattcttctctgcacttccataagccggcccgtaattatttgccagatcaaagtgtacgattccattatcaaatgctgtgaaaaggatttccttcatattctcataaacaccggtatctccaaagttgtgccacaatccaagtgaaattgccgggagttttaatccgctctttccacaacgtacataagccattttctcatatctgtcatttgctgcctgatacatgtttttcttcctctctttcgtaacgtaaaacaggtgataaaatagttctctgtctattctaccacctgttttcattatttaaaataaattttcgtaactgttctatttactcctcagagaactgatcctttccagcagaacacagaggacattcaaaatcttccggtacatcttcccactttgttccaggtgcgataccgccttccgggtatccctgctcttcatcatattcccatccacataaatcacatacatatttcataattccatatctccttttcttttcatctttatttttataattattcctgaccttgcatccattcactacacaacaagatcaatgaatcattaccactaattttcaaaaatcggttcaaaatcgctgacatcatgtccgcagattggacagatataatctgccggaagttcactgccttcatatacataattacagatcttacatctccatccaacgatcttcttatcctgaggtatctctttcttctttggttttacgcgattctgatagtcggcgtaagtaagcggtgcattctcattcagcagttttgcatctgttacttctgcaatgaacagagtgtgtgtaccgagatcctgctgttccagaaccttaccactgatcacggcgcatgcctgatatcccatatatggaatattattctgatctaccggtaacgtaagatctttcatcttatccacatctcttcctgactggaatccgaaatgcttaattgtctcaaaggaacattctacatccaacagactcagtgcaaaaattccgctttctttgatcagatcacaggtataattactgttcaaaacagagatcgcaattcgaactgggtcattcgctacctgcatacatgtattggtaatacagccatttactttctcaccggaacgtgtagataacataaatactccataagacaaattataaagtgcttttttctccatgtgataacctccttcttattttaataataattactattattatattcttaatatagcctattctcccgctattgtcaactgtaaattttattttgtccagtttttctttaaattttatcctgtttttatttgaattttcagacaattctttttatttatgctatactagcattatagtaactcgttaacagcagcattttgtaaaggcagggatgattatgaatttaaactatcttgaagaaacaattagaacatctaaatatcttgtttgtctcgccggaatggaatttatgagagagcaaaatgtcgcatatcatcgagacagcgacgaatcctatcggattgaagaaaagtatggctactctccggaagaattattcagtgcccgtatgtttaacacacatgcagaattattctatgaatattatagaaatgaaattctttccaaacatctggaggcaggaaagggaaatgaagcacttgcaagattagaagaggcaggatatttaaagacaatcattacaaaaggcatctataatatgcctcagaaagccggctgtaaaaatgtgatcaatatgtatggaaatatttatgaaaataatgcgtgtccacgttgcggaaagattttcccgattgaatatatcaaaaacagtgataaagttcctctttgtgatgtgtgtaaatcaactgtgattcatcctggagtttatttacatggtgaaatgctcagtaatactgtcattagccatgctgtggaagaagttgctaaagctgatacgattctcgttctcggaatgaacctgaattccagtctgtgcaaagatatgcttccgcatttcacaggtaaagatttgatcgtaatccacaaggaaccacattatctggatgaaaaagcaaccgcagcttaccatggagcagtcagtgaaattcttccagaagttgcagaaagcatactggatgcataattttccaatattaacacatattcttaaaatacgaatctccagtagaaatcagtatttttatacttgaacttcttctggagattcgtattttttctagataatattcatattttacagttcaccacatcccagaatctctttaatctccggaatcgtcttcttctgttctcttaaccgacgaatctgcgcaatcctttctaagctctcaactctgcggtatcttctggtcagattctcttctgcctgctcgaacggcagcattccttcctctgtataaaatttcaaagtactgtaacgcactgccgtaagccgcacaagctctccgattgtcacatattctgcctgctctattacttccatgcttctctgtcttgacatctactcaccttttctactgtccacataattagtatttcagtactttcttcctactgccagtatgccggtaccaggttgactccctgaatcggtactttatatgctgttttcgtcattgggaagatacggtaatatatattgcctatttttagtaaagtctcactgcctactctgatctcctctaccgcaaagccttttttcttcagatattctacagccgcagctcttctgtccgccacgttagttccaaaaataaccatatcaataaatacagattttcttctgtcaagatacgggaatacaagattaacaccctctaaatatggattcttaagcagtttgctcttagtcttcacaaaccgattcataaatccttcaaaaacattatgaaattctgcttcccataatgcacggtacttctcatcctgaacggcagcttctgtcatacgctctgatacacggttctgctctgatacagaaaataaatcatggatacagccactttcacggagaagccataagagaaccgcatcttccagactaattggaccatcctctagaatctctgcgcgaagtccttcttttattctgatataacttgtctcatcactaaggtatgcctttagttcaacacctgatgtatcataattcatatcacagcccaaaatatctggtacttcctttagaagttcttctgcttccaaaacagcagccacttctttctcaatctgagtctcctcttttttctttaatgtttttgccatctgtaccgctttctgcagttcttcagaaaattctgaaaatgaatccgcatctgcttttcctaattctgtctccaacacccgcgcagccgaaacagctctcaatacagcactttttgccacgcttggatgaatactctcctgtccgtccaacgcaagtaatgcatattgctgagataatgtaagatctttcatacctgtctttctctctttcctcttattgttactgttcacacgatgtgcgaccagcaacgcatctcgccattttaaatcgcctttggcgatggggcgagatgcattcaagtcaaaacgcgcatcctccgtgtcaatcagcggagtgattgacacgggagtgaacagtaacctcttatttcctgatcaccatttttgtattttacttactacttactacttactacttagaaaatatcatacagtacgcaaactgtcaagttgttactattacttctactgactttacctattaacacaataattcaagaatgccaaactgacctttaagacattttcaagtcttcaactattgaaacgtacaccatataatgctattattaataattggcactttaaatgaatttttagtaataacaggagaatatatgaaccaaaaaactgcttctgcccctgcagcagaaaacaaaatgggaaccatgccgattggcagactcttgttcaacatgtccttaccgatgatggtttccatgctagtgcaggcactttataatattgtagacagtatctttgtagcaaaactgtcagaaaatgctcttaccgcagtttctcttgccttcccgttacagatgctgctcgttgcagttgcaaccggtaccggcgttggtatgaatgcacttctttccagagcactcggagcaaaaaaaactgacgaagcaaataagattgcgtctaacggaacatttctttatatcataagttatattgtatttcttatccttggctttacagttgtaaaaccgttctatgcaagccagattggaaatgcagacgttgagatcatggaaatgggaattgattatctgagcacagttatgatcttctctatgggactgctggcacagatttgctttgaacgactgctcacttccacaggaagaaccattttcagtatgacttcccagttatgtggtgcgattacgaatatcatccttgacccgatcctgatctttggtctgatcggtttcccgaagatgggggttacaggtgctgccgtggctacggtcatcggacagtgtgtcggagcacttgtttcatttacatgtaatcataaattcaacccggatgtaaggcttcagttccgtggttttcgtccggacggaaaaattatcagaacaatttatgcaatcggtattccatctattatcatgcagtcgattggttctgttatgacatactccatgaaccgtatcctgatcacattttcatctactgcaactgccgtattcggagtgtatttcaaactgcagagctttttcttcatgcctgtcttcggtttgaataacggtatcactccgatcattgcattcaactacggtgcgcagaacagaaaacgtatggtcaagacgatcaaactcagtatggcaacagcattttgcattatgctcttcggattcctttgctttgaattagttccacaggtacttcttggaatgttcaacgcatctgctgatatgcttacgatcggcgtccctgcgcttcgtatcatcggtatccattacttacttgcatggtttggcatcatctgtggtactgtattccaggcgcttggaaaggccgtgttcagtatgatcgtatccatcatgcgtcagcttgtagtactgattccggctgcatatgtactggcaaaatttggtgggcttcatgcagtatggtgggctttcctgactgcggaagtcatgtcactgattgtctcacttatctttctgttcaggactaatcgaacgattatttccaagatcccggatggaagtgatattctataaaaggaaaaagttatgaaatttaagaaaaattatggatttctttaatcctgttcatcctgtttggcactgtcttttcagaacgaagtgatctcatgctgtaccgcataaaacgaaaacggaaacttgcatatgcaaacatattaatcagtttattgaagaaaacaactttgctgcggtatttactatttctgccggtatcctgccgcttccggatctatcacggaccggttatgaagagattataaagcgaactgacttttcactgaccgtggctaagcagcatggaagaaactgctgttatatattccaggaagaagagtaccagaatttcttacgtatccgtgagatcacaaatgagcttcattcagcagtaaatcatgatttccgtggattctcaataatcttccagccagtcatggatatccgacaggataaactgaccggagcagaggtgctgatacgctttgcttctaaaaaatttggaccgatctcacctgctgagttcataccacttttagagacaagcggactgattattccaaccggacgctggttcatgcgagaagcaataaccgcctgccggaaaatccggatgcaaattcctgatttcaaagttaatattaatgtatcccaggtgcagatcacaaaatcagatattattacagaccttatcagcgagatggacgcttctggtcttccacctgctgcaattgcaatcgaactgacagaaagtattctgctcgaaaaaaatgaaaaggcgcaaaacttcctgaaagaattaaaacaggccggattactgtcagggattctactggggacggtcgtgtccttatgatgagttcaggaaacattttgtggatgtgaaaagataattacatcattaaaaaagagaagccaattcccaagcatttgggaaccagcttctcttttttcactattaaatcgccccggtattctgtatccagacatctctcctagaattttccgccaccgcctccggcagtgcttccggaagatgttgtatgcgtactgcttccgccgccaccactggaagaatcatttttctctttttttgtttttgtcattgtattatacaggaatatgtctctgctctcagtaagattcatacttccagctttcacataattattagctgctgcctggaaacgtactgttttcagctttgatttcatagtgccaacaacaatcaatgaaaggacgataccagctactaatgaaatcggaatccagatccatgacattggtttttgtggttcattatcgatatcataaggttctccggtttttgcctgcgtaataaaatcatcacactcgtcagcaaatgtgtcaaatgctgccgcaaaatcaccatcagacaaatcacccgtcatctcttctcctatgtactggatacctgcatccgtaaatgctgtaatagcatatccgtaggttgccatataccaatcatgatcttccatgctgatcagaagtattgttccatccttgtccggtccataaccataattatgagactcgtagaatcgttccgcataatcagataccgtcagtccatccagtgtatcggttgtggcaaccgtcacatctaccttctgtcgcgtactgatctcatctaacttactggttaacagctccctctcatctgcagacaggagctccgcattgtcgatgacacgaggatattcattcgcaaatccttctgtttcctccgcaaaagccggaactgcaagacctagacagaggatgaggatcgtcataaacgataaaattcttttcttcatttccccacctccctaaaacagtccgatcaggtgcaaaagccatgcagcaccatacgttacaactgagaatacagctgccagcatcaccgtccagcgtgctgctgcacctttatctaccggcagatcaccgacaaactttcctgtctgtccattcattgcaaaggtgtatttatttccgttccgtgtcgtattcagaagccataccggatacagtgcatactttgcttttccgccatgaaattgtacactgctattgtctgttgttactgtagcataaccttttactgtctcagcaaaagcttcctctgtagaatgttttacacgtttattagcacgttcaatactttgttcagcagttacgtcatacttatctgccagatatcctgcgagataagcagtctggaaatccaccgcacctgaaatattgaatggttcgatagattccatcagatcatctgccatctttgtggatccatctaccggaacattctcaaaaccaatacttccaccccggtgaaccataaaatgacttgtctcagtataatcataatcactgtcactccacattcgtacctttgttgcccggtagcggactgtggcatctacatttgtatcaaaaagccagaatggaacgtaaatacctttaatctcatcaatatgattctgatccttgaagatctttggcagaagacgttttccggtcagatgcttcttcaatccttcttttgctgcctttttatctaatttgaacgggatcaccagatccggttttaatgctcccgcaaattgtcccatcattacgatcggattatcacagaatgggcaggatgttgctgccatgttggcatctccgacgatctcgcctccacaggacttacacacatacgtgcgtaaaccatctgcttcaccttcctgccattcactgcctgcggaagtatcccactccatgtcatctgtctgttcattctgcagctctgcatcataacctttgagtgcatccatctcgaactcagtatcacagtacggacacttcatcttctgaatcttactgtcaaaggtgatcgcaccgccacagcaaggacatttatattcctgcaagcctgccataactcattctcctttcttccgtgccgggcttccggcagttattttctaaccgctattcatccgttactgtctgtcgttctcgtcaaagatatctccacactccggacagaatctcggcggattcttcggatcttccggttcccatccgcacttatcacaacggtaaagcggtgcgcctgccggcttctttgctccacagttcgtacagaatttgcctttgtttactgcgccacaggaacacgtccagccttcgtcctctgccggtctcttagaaccgcattccggacagaagttgcctgtcaccgtagctccgcaagagcatttccatgcgcccggttctggtttcggttccggtttctttgctccacagttcggacagaaattacctgttactgtagtaccacatgcacatttccattctcctgctgccggagctgcctgcggtaccggtgccggctgtggtgtcggagctgcctgctgctgtgctgtctgctgagcctgctgttgctgtcccatagcgaaaagattctgtgcattcattccaccacctgcagcgttcattgccatacccatgcccatgaatcctgtcatagctcctgcctcgttgcctgctgcggtcttcatcgcatctgcctgagcaccgacaagtgtagctgctgccattgtaggatcacgcatgattgctgtacgctgtgcctgtttgatcagttctgcatcctcgtccggaagagtaattgatccaaaagcaatactgacaaccttcagtccacgaagagcaccccacttctctgaaagtgcagtattcatggcattttcaagatctgtgttgtgtgttacgatctgatttggacgaagttccatctctgacaaacggccaaatgccggctgcagggctgagataaattctttcttaagagtaccgtcaagttcttcacgggaatattcctgttctacatttccacatacatttgaatagaacaacaacggatcaacaatcttataagaatatacacctgaacaacggattgatacatcaatatccaatccgatcttggagtctactacacggaacggaaccggattcgctgtaccgaaacggttttccagaatttcttttgtattaaagtaataaattctctgatccttacctgtatctccaccataagtaaaacgcttgcctacggttttaaatgtctctttaatgctctcaccgagattacctgagaaaatagatggttctgttgaggtatcatatgtaaattcaccaggctctgcacaaacttctacaaccttaccctgttctacaatgatcatacactgtccatcagccacggcaataccggaaccgttagaaatgatattgtcatttccttttgtattagaagaacgacctgtcgttctcttctgaccctttgtaacaagcacttctttcggcatagattcgcaatagaaaaactccttccattgatccgctaatgttccaccaagtgcacccatacctgctttaataagtcccatactgactcctcctttttcaacttatgatctgtctacattttaaaattctacagacaaatcacggtttgtttcctgctgcctttttacatcgcataaatctgatccatcagatattcagctgtcatagatccatagaaaaactgatcaataaaaccattcttctttgcatcccgaatctctatcgctgcctgtcgttccgtattggaatctacaatgagagcaattttacagtggggacacattttctttacttcatcacgaagcttcactctctcacagaggttccacgggatataacctgtcacttccattataagaacaaatggtttgtacacctgacacaattcaaccgtatccttcggagactccgtacgaatcacatcgatctcataatctgaatttctgaatgcggtcgctatggaatcagcaaacagaaaattctgcatatcgaccacaattttccgcatcaaaccatccccctttccttttgcgacatatccgatgtgttcttttcttttattttattataacaaaaaagaaaaaatccgtctgtcctcgaaagtgaggacaaatagattttacatctgtcggttgcaaagtacaatgagcactgaccattgcgtggttcttctactgtccggttcaaatagctgttctggttcaaaagccctgtgaggatacacataaagcttaatacaaacagatcaattgtcgttaagacataacatcacaaacattccaatcttcgaatttctctacatctaacaataatgctactatctgcaaatgattgccagtagcgaaaaaacaaatagccgcattcccgaaagaatgcagctatttgaagggctaaaaactgttaaaagtgaattggcttttaaatagtttctgcctgcagtttttgctcgaaacgataaattgcttctaacacaatcttaatttcttcgtcccaaccttttacaagtccctcatttacattttcataaattacatcacctgtgaccagatttccagaaactgcactgatcatagcagcacgtttctttctacggtgacaaactgtataaagagcagaactttccatttctacatttaagcaacctaagccggataatttctgaatccactcctctgtctcaccataaaaagcatcatcagaagcattgattccgtaatgcacttttccggatagctgcggctgcatctctcttgcagtatcaataatctcacgagttaaatcaaaatccggtacagatgggaaacaatccggtacataaaagcggcttgtcccttcatttttcatagaacctgtagaaatcatcaaatctccgattttaatgtcatcctgtaacgctgcactgcttccgattcggatcaaacattctgcaccaatattcatcagttcttctgctgcgattgtagcagaaggacatcccataccagtggaagttacagaaatttttacccctttataatatcctgtaaatgtacgatgttctctgttttcagcaacaaattcagcattatccagatattttgcaacacggtctgaacgtgccggatctcccggtaataaaacatattttccgatatctccgggttttaaatgtatatggtactgcttctttcctaatgtctttaattctttatctaatgccataacaaaattctcctacaatcatttttctattttcttaactcaggttgcttcaggatcttatttcatcaatacattaacaacttcttcataagtaggcattccgccctgtgctccgaacttttcaatagacagacttgcggcaacatttgcaaattgtaatgcatccttaacggatgctccgcctgcgatctgcattgcaaatgctccgtttaatgtatctcctgctcctgttgtatcgacaacctttgtctttcttgccggaacagtcaatgtctctccgtcattcaactgcacaagtacacccttttcacccattgtaatcagaagtttctccggatatttttttactaattcctcataatcatttgtctgaaaaagtaattctgcttcatgctcatttggtgtaaaataagtaaccttttcaataatatccatatccaccccttcgattggtgccgggttaaaaagtacaggaatatgattctggttacaaaaatctatcacatacagattcgtttctttcggaatctcattttgtaagacaaccaggtcaaactctgtcaggtaatgtttgattttatcaatatacggcttatccacataatgatttgcaccactgacaataataattgtattatcatcatccccaactgtgatcaaagcaattcctgtaggaacattttctatcgtttggatatgtgttgtagatactccttgtgattccaaattttcaagcattgcttttccattcgcatcatctccgacacagccaaaaaatactacttctgctcctaaccttcccatcgcaacagcctgattagcgccttttcctcccggagtgtattgcaatgattgtcctgctattgtttcaccttttcgcggaattctatctgtctcaactgactggtcaatattaatacttccaacaactgcaattttcataactatgtgcctcctgtacattcaacgttccatcaatcttttatatctccggatgcctgcggtccttttgattttccacctgcaagaactaaaacaatcattgttaatacatatggaagcatctgcaagaattgctccggaatatcaaattccattataattctaattgcctgtgaaaatgcaaacagaagacttgcaaagaatgatcccaaaggattccatcctccgaagatcgttgctgccagcgcaatatatcccctacctgcaaccatttcttttacaaacagattactctgaacaattgaaagataagaaccggctaaaccgcacaacattccacacaaaataacagaaacatatctgtattttttaacatttactccggctgttgcagccgccttcggatgatctcctatcgtacgaagtctcaagcctgcttttgttttaaacatgatataccatgagataaaaactataaaaagtgtaatatacaaatacggcgactgattagtgaacaatgcacccagaacagggatcttactcaatccagggattgtaatcgtcggaatctgagcaacttcttcactcagaccttctttattccaaatcactttacataataccaatgtcaatccagaagcaaaaatgttaattccaactccgctgaccgcctggtttgtatgatatttgatacataaaaccgcatgtaaaagtccgaataatccacccataataatcgcaagtgcaactccaagccaaggaactgatgtaaaagcagtccccataacggctccaattgcacccatcagcatcataccttcaattccgaggttaatgataccacttctttcacagattacacttccaattgaagcaagaattaagggaatggccattcgcaaagtaaccatgaccatatccatagaaaaaagatgtgctaaattttccattatttcgccctccttctcttcatgaatgcaactaattccggagtcgctacgaatagaataaccagaccttgcatcactttgatcatacttgttgaaacgccggccacataactcattgtcattgcacctgattctaaaattccaaataaaagtgcactcaagataactccaaccggatggttattacctaatacagcaaccgcgattcctgtgaatccatatccaggagaaaatccgtctacgaactttcctgtttttccgaatacttccgtaactcctgtcaatgctgcaatcgctccactggctgccatcgtaataataactgtcttaaccatactgattcctgctgcctgtgccgcagaaccattttctccaactgcacgaagtgcaaaacctgctcctgttttgttgataaatacatataacagtgctgccaggatcaatcccagaatcaatgctgtagtcagctgagattttggcaggattttcgtaagcatatattcctgaccgatcgaaggtgattgcataactttggatttcggatctttcatcggaccatgtacacagtagcttgcgaaaaacttcataatatagttcagcatgattgccacaagtacttcattaatattcagctttgcctttaaaaggccattgaatcctccaaccagtgctccggacatcattcctgttaaaaatgatacaagaataacaagaaatctaggaagcccctgcattgccaacgctgtcgctgttgctgtcaatgctccgatataaagctggccttcacatccgatattaaataagcctgctttgttagaaaatgcacatgccataccaacaaataataacggtactgttttgcctaatgttgtcgcaatcgcagttttagatcctaaagcgcctgctaacagtgcctgaaatgcattgattggattttcccctgatacaagcatgatcaatgcagtaattaataaggataaaataattgcaaatattgataagtataattgttcaagacttaaaaatactttttgtttttttacagtttgtttttccattatgattccacgcccctttgaccagccattagcagacctattgactcatttgtaaattcttcattttttccaagtgccatgacctctcctttgtacataaccgcaatacgatcacataattggaaaatgtctgtaagttctgctgaaatcagtaaaatagcttttccttgattcctcagttccaacaagatttcatgaatataattgattgctcctatatccagacctctgaccggctggcagaccagaatgaaatcagaatctttttctacttctcgactcaaaaccatcttctgctggtttccacctgacaaagatcctatactctgcttttcatccaccgcacgcacatcatatttttccattaatttttttgttgtctcagataatgtcttgaaattaatccagccatgctgaacatatttcggatcattctgatttcccaatagataattttctaggattgaaaatcctggaaggattgcacgctgatgtctttcagaaggaatataactcataccaagtcccaaacgctttttcgttggacattctgtaatatcttctcccttgatggaaatctttccttctttacacttctgcagtcccatgatcatctcttccaactgcatctgtccattcccttcaactcctgcaattccaaggatttccccggcatgaacatcaagtgaaactgtattggacgcattttcaagcaactttacattctcgattgataatatcgtttcacctgcatcctgtttcttacgctccaaatggaaagaaacttcatgtccgaccatctcattcgcaagcatttctaccgtaacatcctttgtagctgcctggaacaccgattttccggctcttaatacagtaagtgaatccgataccgcttttgtctcattcagcttatgtgtaatgaagataatcgtctttccctgttttctgatatctctgaaaatatccaaaagctctaatacttcttgtggagttaatacggctgtcggttcgtccaaaatcaggatttctgcaccgcggtacagagttttcaaaatctctactctttgtttcataccaattgacaaatctgcaaccttagcctctgcattcaaatcgaaatgatatttgtctgataactcctgaaccttttttattgcttcttttttattgatactgaactttcctggttcatttccgatcacaacattttcccatactgtaagtgcatccactaacatgaaatgctgatgaaccattcctaatccacattgaaaagcatttcttgcagaatgttttttaatctctttaccgtttatctttaattcgccttcgtctgctttgtacaaaccgaacagcacattcatcaatgttgtttttcctgctccgttttctcctaacaggcagtgtatttcacctttttttactaagaaatcgatttgatcgtttgcagtaaaactaccaaagcgcttcgtaatttttctcatttccacagcatacatatttgccacctcgatattttatgaaaaagaagatgcttaaacttcaaacatcttcttttcttatttcctacagctctaccggaacctgaatttctccagcaatgattttctcttttatctcttctaatttttctactacatcttccggaactttaatattgctgccatctaatgtatatccaattccttcatcttccagtcctaaaaccttttcgcttccaacctgaagatctccttcgagtgctgcttttacaatatcatatgctgcaacatcaacacgttttaacatacttgctacgatatgatccggatctatgatattctgatttgagtttgcaccgattgcaatgaaatcagattcctgagctgctgcaaacacaccaagacctgatccgcccgctgcatggaaaatgatgtcataacctttccccttctgagtcgttgcaatttcttttgcagttgttgtatcaccaaacggattatctccgcctacatactggattgctacatctgcatcagaatcaacatactcgattcctgcacgatatcctgctgcaaaatggttgataatatcattctcaagtgcacctacaaatccatatttatgattatcttctaatccatatgtagctgcatcctgtttcatatatgctgccaacgctcctacaaggaacgatccttcctgttctttgcaggaataacttacaatattatcccctactaaagatgaatcaatggaagcatatttctgatccggataatccggtgctactgatgctaacgcatctacagaatcaaagccaacaccaatgattacttcatattcgtttgaatcactcatcgcacgaagaattgtctcaaaatctgttacttcttttggctcagcatagtcatagtctacgccgagttcttcctttgcacgttccataccttcatatgcaaggtcattataagactgatctcccaggccgcctaagccaaaaaccacagcagctttcatgtctgctttatctgaaccagattctttctttccttcatctgatgaccctgaacatcccattaaacctactgtcatcatacctgctaccataagtgccaaccattttttcatctttctcattttatttcctcctcgtagaatacgttttctttcttcttaatactttttaataaaacgccgcgaacaaagtgtctaaaacttttttggaatcaacttccatacaatgatttacatattctccatcaattggatattctcttaagtctgttacgaccattcctttacaatatgcaccttcacattctattctggtaacacatctgtgtgtctttaccacacttggatctaccgctacgatcattgccagcggatcgtgaagcggacaacattctctcatccaattctgctgtcttgcgccctgcatataccatttcatctcttctcttaagaaatgaatctgctctttacactcttctctgcaatatttttctgcatattctaagtcttcttttcttaagattgtctttaatgtcacatccaatcctaccattgtcatatcccatggtgtttgaacgactatgtcggctgcctcaggatcacctccgatattagcttcaacaacaggcgaaacattacctgtagctaaaaccgttccgcccatggacacaacctttttaatctttccggcgaaatccggataacgtttgattgtttttgcaatattggtcattcgtcctaatgtgactaacaccagttcgccttcattttcagaagcaatctgatacagaaaatcacatacatccatatcaacaggtttttgatcggatggtgctaattcaacattaccgattccatttttcccatgaataaattccgggaaatcaacctcatctccattcaacggttgttcagccccgacacataccggaatcttatgctccattcctgctaattttaagattctcaacgcattgtcagcgccttgctttgctgtcacgtttccaacacttgtagaaatgccaacaacttctacatccggtcttgccagcgcaaataatatagctaaagaatcatctacacccggatcgcaatcaatacaaatcttcatcttttccctccttttactatatcaaaataatattttcaaatccattatcctccgcgattcttttgtatttcatcatttcaccggatgatggagtcctgaaaatctgattatatggagaacgaactccaaactgacgataagcgattattttatatcgaatttgttttttatctaaatacggcttcagcaattttgtgatttgaaaaacagtatcttcattaggcagttgatccggtactataactgtacgaatctcctcaagctttccatgttcagctaagtaaactgcatttttcagaacctgctcattactcataccggttaatttcttatgtacatcgcaatcaaatgctttaacatccaacatcacaccatcacaaacattcataagctctgcatcctgtgaaaaatcataactgccattactatcaattaatgttgataatccttgctgcttcgctaataaaaataactcagccaggaaatctctttgcagtgtacactcaccgcctgacaccgtaattcctcttatatatggaagatccggtgcaatctgttccataatctgttccgctgtataatctttcactcgtggcgaagacatatgaggacatacatggatacaagtatcacattcacaacatttatcttcatcccatacaatctttccgtctttcagggaaagtgctttggctggacacttctcgacacatgcaccacattgaacacactgcccgattgtctccggattgtgacagtaagaacacttaaaattacatttttgtaaaaaaacagctgctctgtttcccggtccgtctacaacactgctatgaataattttattaacgatcgccatttaagctccgcacctttctttcatagatcttactgtttttcacttcgtaatatccccattttgcatttgcctgaggaactgcaataccattgtctaatttagcaatatccgactttttcaccagatatcctgtgattctaataacatctgaatcagacgaataggttgaaaaatactgcattccttctttaaatccgcccttaatcaaatctaaaatagcatccggatttctttttgcggtttcatcaaacgggaaaatatcacccacgcctgatgggaagaaatgatgtacttttgcacagtgatgtaaatgctgatgcagcggaagctccgatccaatcgcaatacgtgctcccggactgatatcatagtcactgtctattccaacctgagcatgtaatggaaaatgatgttccgtgcaatcacaatatttactctcaaaagagtttacacattcctgaagtttttccaggattcggatggccagctgatctgcatcttcgctatatccataacggtcagatttatgctctttttccatcaatgtgtttacgcactcattcataccgacaacaccaaacatgccggtgaaattttcaaccttaacaaatccctcttgtactaagaaatttgatttaaagaaatgactcttttctaccaaaaattcgattttattttcaatatatccacacagttcttttactgcgcgcggcaataactcttccaggaaatgctcgctgtcttttgcacgttctgccagtctacttaaaacaacacgagataatgtaaaggagccgcctgctatcggtaaagcgttgtagcaacttgcaattccataagcgccatcatacagcttgcgatacattttgtgatttgcaaaacttggcttcgcacaattcaatgcacagatcacacatttttctgcaaaatcatccggtgttatatccggatcataaagcagtgtgattgaaggaattgcatttttcaattctgtttcaatctcaacgatcatctcacctgcccttgttgcttcaggtcctaagttcatgtggcaataagaatccggaattgagcggtctaaaaagatcagaaagcttttgatcagcttatatgcattctcatcatccatgaatggttccagcaatttatctacagatcccaggtaaaccggataatgtgtaactgatgggacatgacgataaaagatttccaatgtctgaatcgcttcgaataaattttcaggtggatccaaacgtaagaatttgcatccttctctcattaatttttcataatccggaagaatatatctcggttgatatgtgacatttccttctgccattctgcacaaacatcccgcctcacacaattctctaaactcatttgtagtttcgaaaaattccacataagacaatggcacatccgataacgcgatcatagcctgctcatgcgtaagtgcactatttgttatgatcgattccacagtttcttttaaattagtaatgtttaacatggcaatacctcccaaataatttaatactgaaacaacggttgaaatttattgtcctcttatggcctttatgatatcattaggatggaattttaaaaaatgccatttggcatgtttctagaagaaaggaacaaaaaatgtccggagatctaaaaaaaattgttgaatatgcagaagaatttttagaaaaaagtttagaatctaaaatttttttagatttacttgatcaggcagggctaaaaattgagcatgcctccaagaatgattgtcttatttataatgatatgccttcgaaatatatctatatacttttaaaaggcgcctgttattctgaaaaatacagtccttccggaaaattattgactgccgtagcctgcaaacctatagaaatctacggcttatttgaggctgtacatcctacattaaacagacacacagcaacgattcgctgtgcttctgattgttcctatattcgtattcctatacaaacatatctggatcaactttcaagagatcctgaattcggagtgctcagccttaagcatttgtccttattagttgaacgaattttgaatgaaaatgaatatttacttttaaataatacaaaagacaggttattgcttcatctatttcgatgttgtgaaaatcagaaatttcctgtcatcgtcaaagcaacaaaagaagaattggctcagctgcttaacatcagccttcgtacgctatacagacatttagactgtctgtacgaggagggactgattgcaaccgagcatgggaaaatagtgatttctgaatcacattatcagaaaattaaagaggcggtgcttacgtttgtttaaggctgctttttacacaaaaaagcagctaatctattttccagactaactgctcctgttgaattcttttattaattttgttctgtctctgagatctctaatttcttcttctgaaattccatattagacagtaagatgttcattgcaaaacctacaagcaaagcccatccagaacctttgaatgcaagcactgctgccattactccggcaatacttttatctgtactcgtcttacaataatccataccgattcttgcacatacatatgcctggaataacaaagtgatcgcagaacccacgcccatgattggtttcatgaatgacacgatcggcactaaaataacactgatgaatgttgccatacggaaagaactcattccaccgatcagcgatttcatcgctttctttccttctttataacgcattgcaacagatacggtcataccaatccaaagcggacctgccagtggtgggaacggtgcaaaaattgcaaggagcaggtttctaagaccactgatcaggtttgatctgcttgaattaaagtcaatatattcgtcacttctactgtcctgtgcttcctctaccaacgtctgtgatgtaacaaaatctccaaacgcaagtacataacagatcaacgccaacggaattgcacttataaattttgaaatcggtggaaatccgactgcaaaaatactgactgtgtggaaaatattactaaagtcaggaattcggatgagtcttccaagttcgagaaccggttttgacaattctccaagcaatactcctgctaacatagcaatcagatatgggaataagtttccatattttgccatgatatccaatattttatatttttctctgttcttttcacagaacggtgaaaaactcaaaaacgcaagtaacaatgtaccggaaagtgttgcgattggcgcagtcatcagctggcttccatctgagagctgtccttgcaatactgtaatcggtgctgcaatcagaataccgcctttgattgaattcggcacaccattcacgaatttatctgcaagcttggtaattcccataaatataaatacaaatgcaacaagcagctgcaatgcaatcattgcctgaatacgctccggtccttttgggaatccatttaaatatgccagtgtaaatggtaatgtcggtgtgatccatcccgggacaaccggatctcctaaccatccatgaagcatgtacataaatacttcaatgatgacgcagctccatgcaagttcatacggaagtccaagattatccgtcagatacggaatcgaacttaacgcagtagcgccaaggatcagaccttgaaaaaattctacatattctaatttataatgaattcccggaatacgccactgaaatgggccgagtggaatatagggaagttcgttggcttttcttgttcttttcggactcatcttttaagcttctccttcatttttcgatttacaagtgtctattttttaacaatttaatctcaaaaaaaggactgcattctttttgatgataacatcttttggaacaacagtccattttttcgtataaattgagattgttactatgttacttcctataatgcactttttccgaagatttttttgtgctgtgctactaagtagagagaacttaaaatagcaaggattgcaaatactaacagcatgatcatgaggctgtatactgcacttgcctcaccagatgattttgtaagctgtgctgccactactgggatcaggtagcttgccgcacccataaatgtgtaataaataccagtatttctccccttcggtcctgggttaaataactgaacaactgcaagacctgtctgaagagcacctcctgctgcgaagaatcccaacattgcgatagcgatgtaaatgattgctacctgatggataaacagtacacccgcaagtgccactgctgtacagatagaatcaataaggacaacctttaacgggttccattttaattttgccatcatgaacgcccagaaaagtactgcacagatagacccgattgtataaatagaagtcatacctgctgcctgaatctcggaaagtccacatacggaaagtccaaatgcttttgtatactgctgtgcgccatacatgatcgccatgcaaaggaacgcataaaacattacaagaaatacgataaatttatttggctttacaagcattgcagcctgcactgcattatcggatttgtctttctttccttctgacactttcttctgatcatcataagcaaacggtgcaataattgcaagtaccagacaaacaactgacattacaaccggaataataacatttaatttccagtttccgctgtttgcattatgaacaaccaggaacggataaatcataccggaaacagaaacaaaaaatttgattccgatcagtgcagatccaggtgctaccggataagcttcctgtacagccggatatcctgatgcatcccagaaaccggatgttgcaactcctgaaacaaatccacatacagaagcaactaatgcactttttgtaaataagaatccaaggaagcatagaatatataatgctgctccaccgatcattaattttttacgtcctacatgatccgaaatctctccaccgatccagacgctgacgaatttaccaaagcctgtccatgcaactgctgtacttaccgctgcaagacctgctgcatatgctgctgactgtgggtctgtcatattgaatccccactgttttgcaaagtttacgttgttctgacttaaaatgatagcctggataccatgtgttaaatagcaaaaatatacacaaaggatagaccacaaatatttctttgctctcattccatcattctccttttgtgaatgtaattattttgcctgagccttctgaaattcctgatactcagcaagtggcatctcttttccaacaaacagttcgtagttaactgccccctgctgcagaagcattcctgcgccaccgattgctttgcatcctgcttcttctgcttcaaggatcatctttgtcttctctggattgtatacagtatctgcaacaacaagatccttacggaataaagatttgtcaaccagagttacatcctcgtgtggtttcattcccataatcgttgtattgataagaatatcacaagttttgatctcttcttccagtttagccttatcagcaagatcctctacagtaacaacacagtccggacacttctctgctaatttagcctttgttccttctgctctttcgtagaatttatcttttatattgaaaatgttaacttcttttgctccgtccaatgctaactgaacctgaatagctgtagcggctccaccggcaccaaggacaacaatctttttatcttttacagatacaccgttgatctcaagatttttaacaaatccaacaccatctgtaatgtatcctgtgatcacaccgttatcatttacaaatgcgttacatgctccgatgatctctgctgccggagaaagtttgtcaactaactttgctgcaatatttttacatggcattgtaaagttaccagcgcgcatgttgaataaacgaattgcctcaaatgcttttggcatttcttcctctgttacatcaaatgccagatatgcataatctaatccgtcatgctggaaactgaagttgtacattgccggtgatcctgaatgtccaaccggtgatccaaataatcccattaagcctgtgtgtccagaaattcttttttccatgattctaatcctcctgatataatttcatttataaattcaatgcaacctcatatgcttcttttgtggcatccagtgcacggcgtgctcttactgcgtcacctaccatgtggacttctggtacgatgtcttttaattcttctgcaaagtcataaactacgttctgtccatcacggtgtgtataacgtgagctgaatcccatagagagaacaactgtgtcgaatcctcttgcctcgtagatcgtctcgtctgatttatctgctgcatttttgtaacttacgccatctgagaagatttctgatacagctgcacttgtaatctgtttgatgccatatttttcaaatgcttccataagaaaaattctgtgctcatggatcacatccggtccgatcgcatctctcatttcgataatggctacttcatgtccctgctctgctaagaagtctgctgtctctgcacctaccataccgccaccaacaactaagactttatgtcctaccgggcgtgttccttccaggcagtcaacaccatagacgatatccggattttcaatacctttgataaatggaagtactaaagtctcagctcctgttgcaaggatcactgcatccggtgtatcttctttcaacatctgtgcagttacttttgtattcatcttgatattaactccggctttttcacattttacaatgtaacttctgatcatacctgtgatatcaccttttcctggtggatatgcagccagtctcatattaccgccaagcttatctgtagcttcaaataatgttacatcatgtccgcgtctcttcgctgtaaatgcagcacacatacctgccacaccaccaccgatcacgtaaacttttttcgccttttcagccttcggaagtccttctttttcatgtccgagtactggatttacaagacaacagattggtttacctgcatacatattggcaacacagccctgaagacaggcgatacatggtgtaagatcttccagtctttcttccattgctttctgtggtgtgtgcggatctgcaagtgactgacgtccaaatgctactaaatctgcatttcccattttaatgatctgttctgcaaactgtggttctgtatatcttccgactgtaataaccggaatagaaacacatttcttgatatttgcaacaagctctgctgagaatccgccgtgaattcctgtcggagcccacatatactcatcttttaaatgtactgcacgggatacgtgaagaccatcaattccgcaatcttctaaataagaagcaactgcacacatatcgtgattatcaagtcctccaaacatgtcttctgtactgttaatacgtgcaagaacagcaatctttccttctgttttcttctttacttcttcaataatgagacgtgaaaatctcattctgttctcaaagtttccgccaaattcatcgacacgcttatttgttcttggtgacataaatgaatttacaagatagccgtgcgccatatggatctctactgcatctgctccacctttcattgcacgttctgctgcttcaccatatccttttacaagctcatacactttttctgtagatacttcttcaggaatgtctcttccatctgctgatgcgattgctgtagcagcctggatcggtgctcctgcattctttgcatttccttccggtcctgcattctgaagctggatagatacctttgcaccttcttcatggcaggcatctgtaattttcttcaggctttcaatgctgttgtcatcataaagacatggttttttaggacctcccttagcccctttatgtactacagtcgcttcaattgtgatcagaccaaactgaccttttgcacgctcaccatagtaagccacagattcgtcactccatgttccgtctaaatttgcgaaattatttcccatcggtggaaccacaaaacgattcttaactgtcataggtccaatctgaatcggagaaaacatatttttgaatttcatcattttacctctctctttggcatcatctgtttttcaaattagtctaccaactctggccaaacttcttttaatactttctctgtgttttcatatgtataagcagctgcttctttcagtccctttccaaggattgcatcagaaataacttctacaccaacaaccttcggatcaactcctgcgtctttaatcatcttaacaaatcctgctgtatcttttgctcctgttcccggtgcaagacgatcatgcatagactcatctcttaaaataggtgctgcatatggtctttcataagcatcattgatctggatagaaataactttcttggcaatctccggtgtaaggatatcgtatggctgatctgctcttacccagtgccatgtatcaagaatgagcattgcattgtcgcatccagaagcttttacaacttcccagcctttcttaagatccggaattccgctgtatggcatcggctcaacaccaatgatgtattttcctgctctctggcaaagttcttttaatttctgtgctgtgtactcaacagaataattttccatcagtccacagttgatgtggcctactccaaagagttcgcacatatgaaaacacatctgctctttgtatttctgctcataagaacgatgttcctcacaccactgaacaatgtactctacctctgttactttcatatcatgtttgtcaagaattgcaagaatgtcttcatcatgaagtccttcattcaatgcatcaacataagtctctgcgcgaagaccgattccttcatatcctgcttcctttgcagcgattacacgatcttcaaatttgcactgatctccaagtgtccatgaacttactgtgattgggtttttctttgacataattcttcctccattgtaaaaattgaatataatccattggatttttctgttcaatcttgttgtttttttctatttttattatatctgtttgttaaataaatgacaaattggtaattctatcacgatccatgcattttgtttatagattttatttacacttcatgttacgatattcttatcaataagcattattgcgtatttatctctcaaatagagtaactgttcagagccaacctccaaaatgctacgcatttcgtcggtgtggcgtatccgccaaataaaatttcaaaaacagtcttaaaaatgcaagcattttacatctgttttatgaaattttgcttggctctgaacagttaccaaatagatataaaatgaacctgattaaatgggaagatacaaatttttataaggaaggtactagactttatgaatctctatcatcttagatattttgttactctcgctcatctagaacactacacaaaggctgcggagattctttctatcactcaaccaagcttaagtcatgcaatctcatctctggaaagtgagctcggagtaaaactctttgaaaaagatggacgtaacgttgtcctcacaaaatgtggacaggcttttcttgtcgatgtggaacaggctttggatatgctggattcaagcatcaataaactgcagatgaccggatttggggaaggccgcatcgatattgttgaactccgtacgctcagcagtgcagttgttccgaactttgtaaaaggttttttggattccacgcctaacaaaaaaatcgatttttattttcatagttcaaccggactcacatccgacatgatccagggattaaaagagcgaaaatacgacatcgcattttgttccaagatggacaatgaaccgctcgttgagtttgttcccgtcgcaaaacaagagcttgtactgatcgtaccggaaggacatcctttggacaggaaaacttcgattgatctaaaagaagcgcttacgtatccgcacatcgttttctctaagcgaagcggtttaagacatgtaattgacaagttatttgaaaaatgtggcggataccctcagattgcttactcaatggaagaagatcagggtgttgccggattagtcagtgccggattcggcatcgcagttgtgccgcgaatgccgattctttcctctttaccggtttcaatcatagagattgcaactccgtcctgggagagactcttctacatggcaactttgaagaatgtttatcaggcacctgttgttacgaattttaagaattatgtattggaacatgctgaattatagaatgatacatttcttctactttacagcatcggtacgatcatatttacccagaaccaactcaccggcatcacaagcaccatggccgggatcatgtctgcgactggaaaatcgtgaatctttgcgatccggaaaccagttgcaagaagcaggaagcctccacatgccttgaagtcggcaatcatatccggcgtggtcagtgggaagataaattttgctgctgcgaatataataaggaagatcacacactgcggaattgcaactgcagcaaccaccatacctaatgttcctccaaaaatcatcgcagtaaagaaatccagaatcgacttcgaaatcaaaattgtatgatcaccgctcattccggaatccagtgaaccataaatccctgtcccactggcacaaaacaatacgatgatcgtcacaagcattgacatatactcttctctggacatggatttgttcttattggggaagagttttcccactggtttctccatgcaggtcgctccgccattaataattccgcccagattgactgccagaccaaaggcagttccaattatcactgcaaaaataacagcaggcatatttttcataagtccaatggaactaactcccattcccattgagcagacaccaaatatcttggtaagttccgaattgatttttgcaggcagcttgtgcccgaataatgccccgatcacaccgccggctgcaaccgacagggcattgataataactcctattggcatattcatccctctactttctaaaacacagatgcggtgtaagaaatctcctacaccgcaaattttcagtttgatattcagtttatcataatactttttataatgtaaagcttttattttccctatatatacgttcttttacagtgaactcactgtccgtgagcatacgctgtaagttttctttaaaagcaaggtagacgaaacgactctcctctgtttttcatccgaatcttctttcgcaaaatatgtgccatctttcaaagaatatttccaataatcaaaaaatttacagtaacgcctctttgtatgactgaacatgaggcttcacttctccgtctatgtaactatcaagaaattctttcatacagttacggctatagcgattactatgaataatctgtgcaaaacgactcaaagtatttgaaatcgtatcattgaccaaaatataatcataactattggcacatgaaatctcttcttctgctatttccattaaagcattcacttcttcttcggtataaattccagtactagacagccggctctttaattcatcccaagatggcggcaaaatgtaaatcagtgtagcatccggacaaagtgcacgaatcttcattgctccgattgtatccacgtccagaattacatttttccctcttgtacgcgcttcctctacacttttcttcgttgttccgtaagcattaccattcacgtatgtatattccaacatctcacccatacgaaccattcgctcaaattccggtacagacacaaaccaatagtcttttccgtctatttcatgctttctctgtcttctcgttgtcacagatacactgacacacgcctgttcatgatcctgcaaatactctctcaaaaccgtcttattccccacacccgacggtcccgaaacaacaatcaactgtccatattctgcaatcttgtccaaatattcctttttcatcgccgtttcttccttcctctcaaccatattttcgtatgatttacacttttttattataaattcagacaatatattacgtcaagcatatttttcatacagattaactcagttttacttgttgtcctgtgatttgtatttctgtttccataacaaaaaagaagagaactctcatttcactggagttctcttctcttagtcatttactatttttctttgatttactcactctcttttccaaaattcacagcaagtacgatcatattgattccctgcattaaaacagcaaatgcgatcatatatccaactgagaacatagtcaataccggatgtgtaaaggctataatacttacaataacagataacacaccacaaacaattgctaaaattgcttttcccttagaatctttaaacttcttcactccggctacaatctggaagataccataaatcaggacactggcaccaaccagataagttgccatgatatctgtaagaaatctctgtacgccactgaacaataaaatgataccgccaagtccttccaggactccaagaatacatcctccgatatctttcttctcttttgacaatgaaagtatcacaagttcaataccattcacgaagagaagcattccaagaatccatccgattgctaaaaaagtcctcataggtcgaactactgcataaaaacctaacagcactgtcaggattcctgtgattaatgtgataattttaattgttttattctccttcatttttgctgcccctttcatttttacatttctttttttctatgataacacaattttttatttacttgttacctttttatattttatttcacaaccaaatacaagcattgagaatatcaatatcgcaatccaaattcttgcattgctctcgtctcctgttttcgcatttgttgtgctttcgtcttgtaaatgttcctcatcttcaggatggttctcctgctcattttcggaatttcctgtcacttatgcttttacgctggtacttcccgcataagttgcagaatctgttgtctcctgagccagagatttccttggaactgataaagtacaaatacatacaagaacgagcgacataaaaaagatttttaacaagctttttcttgtattactccactcttttttaatttgcatgtacatctacaatctttgtatagaaattaagtgtaccggtgtactgtccaccccagacagaaagatctttattatataactgattacggttcagtcttaatttgtcagttgcttcttgacctgctcccgtaaatagattaaataaaaatccatttgcataccatgtcccattttgaatactctcatcgttgttattcataatctcataattcagaacacaatctgaatgtgtattatgtgtcaggcaaaacggatcagtactttgagttgctgtcgcatcttttactaaaacagcgattccacttcctgccgccagattatctgcttgtatacaagatactgtgatatctttggttgaatatgcatttccttctgtcccaggctgctgtatttttccaaaatcaaccttatccggaatttctataacataagctgctttattttcattttcctccactgttgcagtcacttgcgtatctcccgctttgttagtctcactatccggatcaagctcttttgcaaaaacacctgttgacataacagataccatcatcgttgctgccataaatcctgctactaatttgtttttcatcattctacctccacgttttattcttttacatataatttaaactctgcgcttccgccgtttaacggacttttatcttctaatgaataacacttatattctataactgcctgatactctccggcttccagttcctggtcaagcgtaatattctccagaccttctcccggtttcagctcttgtgattcgaacagtatcgttccatcttccagtttcaatacaattacaaaaatgcaatcattatctgccggattaccaatgcttactgtctgctcctttgtatttgccttcattaccatacttgtatatcccggaatcaggattcctttttcctcggaaggttcttcctcctcgatatccacatcccaggctactacttctgcagacgaatttccggttttctgattcttttggttcataacataccaggtaattcctgcggctgctatcacagccgcaatcagaattccgattataatctttgtcttttttttcatcttattttcttgctttcttttttctccagtaaataactccacctgctacactacctgccacaacaacaatacaacgcaaaagaatcacactgctgttatctcctgtttttactgtatccttaatatgatcaactgctttggagagctcactcttttcagccagtacagcaaacggaaccatctcttccacatcttttgaggcgatcatctgtttatcaatttcaagctcttcgatctgattatttcgataaacaagaaccttatatccttttcctcgatactttgacaaatccagttttacattcagatttccttcgtatgcagacggctgtccatcttcatatactaacgtcgattctgctgaataaagaacctgcttatctgtcttctgtgcatatttcttaaatgcctgataaatgtcattcttcttgtcaagctcgttcaactgaagtttcgtatctttatgcatcataccttttacggtaagtcctcttgatgcgttcactaattcaacttccgtaataagcgaagataagattcttggatacccctgattctttgttgaattccatgtccaactacacaattcttcattgcctgctaccagagtatttaattcctctttaaaagcattgctcttcatctcagccgctgttttcgctgttccctgttcttcgtttcctgataaggtatcctggtaatatgtgttatttacagctcctgctgtttcttcttttgcgccaaatactgctccggttgtcccaccttctatcgcagtttgtgcactatatgcaatttgaatggagccatttttatccagctttccaacgattcctccggcaattccattttccttagttgacagagcacctatactcatacagttctcaatcgttccgctgtttactactgcaattcctccagcaattccatctgatgcacttgctgttgcctttgcatagttcgcagtatttcgaatcacacctttattctcaactacaacgcctcctgccattgatgtgcccttaacaaatgtcgttgtctccgtcaaatttttaggctcatgcgtgagttgatcagtaaatggaccgctgagatttgatccactgatacactcatcaatcaatccataattgacaatcgctagacctgctgctttctctccttcaatattttgataaaaagctgcgaaattctttacacttccccgtgcaccgatcgtatcaaaaagtgctgcatttccatctgatgatttgatatcgaatcggtagacataatatccttgtccgtcaaatgtaccattatacggattgtctgctgaaccgattgattctgtcattgttttaccgtttccgaaaattgtgttcatcagcttgaagtttgcacgattgttcttcttaacaatttccggaattttcttaaattcttcaaatgtacgaatctcgtaagtttcttctacaggttctttctcataattcgaataggttccatcttcccaacgatagactgtgccatgtgtatcatccagaaccggataagcatccggagtttctccgttatcaatattctgataccatacttgagagccgtctgtcacctcgttatttaaaagatatgcctcttcaccactcttgaactgttctgctgtctttgcctttgccagttcttcatcattcgcaatctcagcttctcccaggaaaccttttaccggaagtgtatcgagataataattattcttgattccatctttcttcgccgcacagtatccggaaattgcaccatagatctccttccactcttcagcaagcacactgccataattgtaacaatcagaaagaatgaaatcctcttcacccaatgcaacctgtccggtgattccaccgctgtaaccacgtcctccgtgattttccactttataatatgtgatcaatccgtaatttgcacaatccttgatttttgtgccgcctgcatatgtatcatcatcagttacaaaacctacaattccgccgatatagtatatcaatccacttccaatatttacatttgaattcacccgcctgatcacactgtcggaagttgttcctacaacaccacctactgcacttgccgcctctgctgttgtaacgattgttccattcagtgtaaagttcttaagcgtcgctttctttgcctcgtctgtctcgttcgggtcactcataaggttctggaaaaagcctattgactgatcatttactttcgtcatactgaaatcagaaatcgtatgattctgtccgtcgaaaatccctttgaattctccgattggtttccattcatagttttcatccgccggattcttaagtgaaatgtcagacaccagcactccatgtgcatctggctttgcttcctgaatctgtgtatgttcaccgtccccatttacaagagcggcaaaccaaaacatctgtccaccattcccaatctcataactgcctgtagattcattatagtctgccggctgatatccaccacatttcgtacagaatccattgtcataggaatgttccttgcagactgcattataatataatgtaatatccttcgccggcattacgaaacttccttttctgtcaccctcataattttctgttaatgcaagctctttataagtatttccctcataatatccgacactctttacattatctgatacataaaattcaacattttctccttcttcaaagtaatctacataggaatccaattgaattgcatcttcaaatgactgattcgtacctttcacatataccttatgtcctactgctccgtttaaaacaaatgttgcatttgaatatggtgcactgtatgtatatgtataatatccttcttcatccggactcaatgtcgcgatctggtcttttgtcaacaacgtttcttccgaagttacttctgatggattttctgtattgttatgtctctgtaatgtaatggattccagaacagttgtaccttccgccttaaaccgaagtgttacctcttttcctgaaggaacagtattttcctgacatgttgtcccatcttcctgaatcatttctaactctgtatctccgactccattcgtagcaacatcaactttcgtcttataataaccatcttcttgtgggcggttctttaatataacggtatatgccgaatatgcccccgctgatttatccggttgaattttttctgcacttaaagtagaactttcaagactgcttcccggatactgtcctgttgtatcaaccacatggaaaatcgtatagcttgtcgcccatgcatcatgataatcaaaatcataatccgataaagcaatatatgtttttgtatctttttttgtaagcaggtattcactcagataatcaccaggtatacttgataatgcactgaatagtcctgtagcgaataagctctgaaattccgccgtatttttcgcgcaactaaattgattctgcccatcgctataattttcttttgttaaattaataaaatcacaagatggaatatgttgatctctcgccaaagtaagatctattttctcttcaaattgataaaaccgcaaattttcaggaacagaatcgtctgaattccaagcccaatcctcttccgcatcgtgtggctgtgatgtatcgaaaatataataaatatctattcccgatggattctcctccgttttaggtgtcggcacagcaattctgtgaaaattaataaacggcgtaattacatcagcattggatttccaaccatactcctcaataaggtaaagataaccttcgttaaacgcatcgataatcggttgctcattctcatagaactcgcctgttaatttctcatggtaattttcatttttcatacgtacagataccatgtcttctggctttacaaattcatccaatttcatccgaatcgaaccaaccgttgaatccgaaactaatatttctctgtcaagcatagtatccatagctttggcaacatcttcattcaacttatttaaatcattcgtccatgcagcatagctctcccatttactttcatcatctggatatttctcttcaaaataatcaccacgctgtgcaataaattcctgatacatcatctccatcttaatgatttccataaattgtttatcaatacttgaaactatgtaattatattgatcaccagaaaatccataagccctatatgcaaattgtgccgcagcatccgcataatttttctcatcactcggcttattcaacgcattgatcatactccaaatcgatcttttgaatacaccatctatcgtgtcattacaaaatatagcgtcctttttttctcatcggttggattttcaaagctatttccagccgctttataaacctcaataaaattgtcataaagcttttgcttactcttttcgacagcatttatatccgtcttaccatccatatacagttgcgcggctttcatataatcttcataggcgctcaatgtatttcctacatttccggcagtttcatatacatctatatctttagaccattgctgattcagctcatttttcgcttctgtgtactgtattttctgaagtgtattctctatttctgcatcatactctttaagatgttgatcaacgatcttaacttcatttctctgcctgatgattcgttttgtatcattatttatacttttttataataccactcacacggttaatcagcaatcttttttgctcaaatctgcgcttttatttaatgtttcttagataaattgttgtgaagctcaattaaagtgcattttattttcattgattattgcattttaattatttctattgtattttcaaaacaactatagtaatataaaattatcacaataaaggaaggtctcatatgcgttataatgttccactatatttcgaacgaaagaatatcaaaagttcagatattttttaccttaccagacagaatcctcacacaatcattacgctttcctcgggagaaagcattacgactacaatcccgataaaagaacttatgctttacttgccggaagaagattttctaaatatctcaaagggcattgttcttcgaaaaaatcaaattgttcatatatctgacgaaggactttatacaatgacggatggtgctgtctttcaagggagaaaacgtaatctgagtcagcacaaacagatccgtaaggaacttggtttaaatacgcagaacctttcggaggtttcagaagacagctctcttcaattatttgataactgtagctttctcaatgatatgccacttgctttttgtattattgaacttgtatttgatgcggagggacatggtgtagactttgtattccgttactgtaatgatgaaatgactgttgttgagggcgttcccgtttcagaaatgttgaatcgttcattttatgaagtctttgaaaacggggataaaaaatggcttgtcacttatgcagatgtagcgttaaacggcaataaacatatcctgcatgattatagtccggaaatcgacaagactctgaccatctactgttttcaaccagctccgggatattgtgcatgtgtgttgattccgtcttagctttctgctatttggcgcatacgattacaaaactatttttctgtaaagaaaaaggctgtgatttcaaaatgtattctttacatcctgaaatcacagtctctgatatgcaatttttttgactttagagaaaaattatgtattatcgttcaaattgtagcacaggtacaacatatctataattttttgtttatccgtccctctaatgcctaatgattttaaatccactgtttcatcagctatttcagataagaactttttcatatcctctgctatttccgaactgagaacttgccttgtattgactgtgattaactgtgctaatcggaacacatcgtttttatgtttctttatatttttgctgtcaacctgctctccattcaacttgcgttcttttaaatccagccacgctttcgccttaaatggtatcaggcaagtcggacttaataccggaatgccttcaaccatcatttgtccagtttttagcaattcataatacgcttcatttagaaggattgccgacaagctggagatttcatcgtctatcggaagcggtgtgagaactgcatcatcttccaatataataaaatctggatttttggaaaatatttctatcatatatggatattctttgcttttcggagatgtgaaacgataaaactgtgcatttccggtacttttattcaaatgctcatatcctgcttctttgacatactcccaaaactgcctgccaaactccgctgttatggattcaacaatcagtacaatatctacatcttttgtagcacgaaacggtaattcttcgttttccataatcaaatcacacgctgtcccaccgatgatgacatattgattttcaaagccctgaaatctttccttaaattttgtaaatccgctgaccattactccttcaaccttctttcctgtaattcatctactgcctcttcaattctctcatcgtttgtatctgcaaaagacaaaacaatggaaatatcatcagcactgttatcctctgaaaattgtttcgggttgtatgcccataattcaagtcttatctgtttatccgggtctatcaattcatcagtcagcaaggttttatcataatctttctcactaattgcataggtaacaactcgacttggatttagcattgttttttcagaaagtgccgtttcccctgcaaagaccatattttctgtaacttgcgtcttatctatatatcctgtttttcgaacaggagtcgtcaaatatacttttgcttttttaaataattcatctcgcttatattttgactcaataaacttattgacaccgtcttttgctacaagaaataaatccgtcgcttccaactgttttactgctctggtcagggtcattgctgtaaatggaagcacttttccggcttctgaaatatacaatcgttttttcttactgtacagataaaataaaaacaactgctgcgtggagtaaacaaacttacccgtcagcttttggggttctttttcatcagaaagcattgtcccaatgaaaggaagaaagacttgcttatcagtaataaacggtatattattttctataaggctttttcttcgataatttgataccgttgtaagttcaaatacaactggcacattatcaatctgctgtatttttacaatttgttttttcaatgccggaagtgtggcaagttcttctgttggagcaagcattatacagcgtctgtttccaatatatgctgtatgaaaatcataactccctgcaatataaacaggcaaagaatcctgatgattccatgcttcatattttatagaaatcccgaatacgcttgtaaacatatttctcgttctccttttaactcattttctttcattttaactttgacaatgttaaaagtcaagtttttgagttattttgatttttctaaaattcttttctctcacaccctgtattttccccctccatcttttgtatatgtaagagggttcgtagattagagcaagatccacccaggtattaccgtatcgccattttatggctacggcatacctccgggtaagtctcttgatggggattccgattccccataccctcgtacagacatcaaagatatctgtaggctctctatcaaagatagtggcagcactttatataactataactggaagggacagccggttaaaaagtgtaatcgcatatccaggatgtcttatcaaaaaggaaggaggactatggcaccaaagaagaaagaaaagaatctcaagagaagtaatatcatcacattaaaactaacggatattgagttggcagtattaaatgaagctgctgacgttacaggactttctcattccgaatatctgagaaaacttctgcttgagaagcaaatcaatcaccagattgaagttgttgcagacatgaacgacctcagaaaactggtcagtgaatatggaaaaatcggatcgaatctcaatcagatcgccaagcattttaacagcggtggcagtcagtcacgtgctatagaaaatgaaatccatcagtgcatcacggacttattcctattgagaaaagaagtactgaaactggcaggtggtatgaatggcaatcgtaaaacacattaaaagcagaaatgcaaattactcagctgctatcaattatcttctgtttgaacacaatgaaaaaaccgggaaaaagattgtagatgaatccggtcgaagcatcctgcgaaaagagttttacatggatgggtttcatagcagctcctcctttaatcgttcatgtattcatagtaatcggattcactagcaaacaagatatatttaccatctaccaatcccatgtaaccatcaacagtgttaaaacctttcattgccaactcctccatttctttgaattttatgatttaatcttctttgatggttacagtgtatatcaatagatggggtataaaaacccctgctatctttgggtttatgcaacacttttaaatatacgtttttgcgtctttaaatatctctgtaaattcagaattgaattgtcagaagattttttctcatcatcagttaattctactgcattatcactggctaatttaacagtgtattcataaatacgatttaccagtacatccaattcttcggtagtcaattcaatcttcaacatttcatatcttttatcttgtttcagctcttctaaagcatccattaggcgattgatagatttcatacttagttcaccatttcgaatatcttcaatataggatctcaaagctgcatgatatctcttcattaccttcggttctctgtttttaattttttgatgaacaaaatttcctgctaccattgtccctgcaacagctgttccgataataatcactttcctatttttctttgaaaattcaatcaccttagttacaacatttttgttttgtgctacttgttcaatttttattggatccaagtgctttacaatctgccctttatttggaccaattgcaactcgaacaactccaccgagtctgcgatattctccagttgccaattttgtcatgatatccattggaatatcaaatgcttctgttactactgccataatcaaattctcctcctctttcatttcataatagattccacattttgcgaggtctaatatctcttgttgtttactgatgcttcaagtataataaaattcatagaggaaatacacgcacagcatgtggacttaacacctgataatcctcatgttcggcgatatacggggaggttattctcatggggaaacaatctacaagagaaaataagacaatttatcagatttgtcgggaagaagccggtcttaccagatcagaagccagcgaaaaaatgactgctgtttctgattctaaaattgaaaaatttgaatatgaaatgcaggaacctacaccttacgatattatccagatggcagacgcttacgggcgaccagatctctgcaattattactgctctcataaatgcgaaatcggtcatcgttatgtcccggaagtcgaagtttctgacttatccaatataatcctggaaaccattgccagtctgaatgagattaatcctcttaccacacgtctgatccagattgcccgtgacggtaagatcagcgatgatgagatcaaggattttgcttttatcagtaacaaactggatgagatttctctggcaatagattctctgaatctctgggttgataaaacagccggagagcagggactaaacatcgaattgctcagagaagaaaaaaagaaacaaaaataagtatgaaaaaacaaggcagcgaacctatttatggtccactgcctctttcctttacatatgctgtaactggtttatgatgtattccgttctgcggatagcttcttccacctgatgtctggcattattgattcgatcctgcaccatccaatccacaacaaatccatcaaagaagtaatctgcaaaggataagaagtctccagtattgatgttcaaattacaagccatgttcacatcatttaattccctactaaaattacgaagatcatatttcgcctgttccatattttgtctggcctgatccatcttggagtgtttcaacatcgtagaaaagaatccaccgccaaacatatccaccaagccccaattttttgcactgttcaggttttcttttgctatccgaagactacttaacgctcgttgtcctgcttcaatcgcttctcgtttttctttttctatatcatatcccataatatcccctccgaatttttatgaattagatgttataagtgcaatgattccacctacgatcaatagcggaaatgcaatataaatcagtccaccaacaaccattcctatcaaaatcaccgggaaaaatacaactgtacagagcagctttaagattccccaggatgcttttacaccaaatataaaaaattttccaataaaccagattatgcatatagcaaatagtaacgataacatattctactccttctgactcctgttatgatttgaatcattcatttttttgattgtttacttgatataaactcagatgtatttctcacaccgattttactactgaattctgggttcttctctattttttcaatcatccgaattaaccttattcgctgtgctgtatccatctgctcacctcattctaacagttctgccttttgatattgtcagtataaccggataacttttcaaaatatatacctaatacaaagaattgaacatatgtaattctcaattttcgagggtagagtaggcggatgagaaatttcatccgcccctcatcaaacctgcatgaggttctccctcacacggctttccaacattcttctttctacagcattacgtcatgctctagccattttctttaatcctttttcgtaaatgctatttctaacaaatcccattcttgacatatgtttacgcctttggtgtttcttgttataccatcttgtaaaggtacagataatgtaccagtccaatgcctgcatccatttttcatttgttttggtggaataataattcttccaacctgtgattttcggatttagattctttattaaatcctcttcctttgcaatcagcagacttcgactgtttacatttcttttaatttctactttcattttcctcatagctttcctgctcggatactgataagtttctttatacaattgtcctttgcttgtttccgttgtcattcttctgtggtgcattccaagaaagtcaaattcctcttttccgttccacatgctgacaatctttgtttttactgggtgtagctttaaatccagttttgtcatgatgtactgcaataagttcagtgcgtgatttgcacttttcttattcttgcagatgattactgtatcatctgcgtaccttacaagaataccgtgagtaagtccatacttttcccacagtctgtccagtgtatttaagtagatgtttgccaataacggagatataactgaaccttggcttgttcccggttcagagattgtcagtacatttccgtataatactcctgatactaaccattgtcttatcagcttcaatatcttcgattctgattccctctacaccactggaacctttgttagcttttacccgtttccatgcctcgaaaagtacatcatcccgatacaccttatcgtacagtgcatgaaatcttcggctgtcacatttcttggctgtcagatatagtttgttttgaagttgtcgaactttttctttggagttattagtctgcatgacattctctcactcttaccctctctacaaacttgaatgaagtaaggaaccttcccataaactgcgttttcttgcacagtcattatcggtactatgttcctctccgactccctcccatcagaaatacgatttcgccaagcttatacgctttctttttaccttttggtgatgggtagggtctctccagttccgaaccacacttttcatacataccgcttcctctataccgagagattcttccgtgctgctttccagtttcttcacacgttccatggttttcgcccatatacccagggctcaacttctctttgctctcctatcagagacctttttagcgatacggcagaattcacttaatgttacggcctgcatgattgctcgctcctcttgtcgaggttactttatccactcgcttagcaccctgtattactacaacgcaccgagtttagctacacggctcactggcgattaccgtgaccggactttcaccggcaagtgtggtccagcttcgctggacacacgaaatagaaaaagccctttgagaaaaggatttctcctctctcaaagggcaaattgaaaaacgtgaatttatcgatttctttattatctaatctgttaataatctatccaacagcatctgcctattatttataaacatttctgttacctggtaactctctgtatcctcatattcgcacagatgtatgcgtccattatcaaaacaatagatatctgcatctggtattcctaacaaaattggcgaatgcgtaactataataaactgtgctccctcttttgcacatctgtatatttgcatcaacaatgtaagctgtctctgcggcgataatgcagcttccggctcgtcaaaaagatacaatccatttggattcatattattctgtgctaatgcaagaaaactctctccatgtgatttttcatgatatttagcggaaggatgtgtaatatctgcatattcttcttcctgcgttgcaacattataaaagctttctgccctaagaaaatatccccacttttccttccgataacctttgacaattcttatcgcatcacacaactctgaatgtgtatcatgcgtagaaaaaacataattcttcgttccaccctcaggattaaaaccatgtgctacggcaagtgcttccaataaagttgatttaccgctgccattttcccctacaaaaaaagtaattggtttgttaaaatcaagtttttcaatccccttaaaagcctcgattctctttaaataactatcgttatcaattctattccaatcgaatattaccccttgtaagaattgatcattcatctaatcaccttcctgtaaaagacactttctaatccaccaatccttcgttctaaagaactcggtcaactggaatttatataattattcctctaactttccccattttataggctttcctgcctgtccattagtgaaatgatatgtagtttcccttatttttgcccttatgagataatcacaagggaaataagggaattttttttaatcattgcctaccactttatcaagaagccgaaccgattttcgtttcgcatctcttgtggagtgagcatagacattcattgtggtacttacatctgagtgtcctaataattcctgcacatcttttggagcagctccatttgccaaaaggttgcttgtataggtgtgacgtaactggtggaaatgaaagccttcaaatccctctaatgtttttgccacctttctgcataccgtccccaaagtagtcggaagttccagacaaccatccggtcttaagcagacgaaagaaatttctttataatctgccgggacttcctctgttctgtctaagcagtaatattcgtagtacactctgtttttctctttgacctctttgtagtagttcgtgtgataaagttctccgtactgcattcgattttttaactgctctttccgggcattgcggaaaatctctaccagcgtatctccaaaatcaacaacccttacttttttccgcttggttggtccgatgatatatttgcgctttgagccatcatatcggatgctacgtcttatggtaaggcattgttcttccagatttacgtcctgccatgccaaaccacaggcttctccaatacgaagcccggcataataggctatctggattggaagtattgcggctgggttctttttttgaagatacgcaagcagtctttcataatcttctcgtgaaattggttggatatttccgtccatgtcctcatccgaaaacaaatcaacttcgtccgtctgataccgcagtttaatatactgcatgggattgaacgtaatatactgttttggaaatactgcaaagcggaaagactgctgcatgactgcggaaaaagaatggatgtaatctttgctgtaaccctttctctcttttccatcgggatgaactcccccgaaggaaagcaaatcgaagaaagattgcaaatgttcagaggttacatttttcagtttacgttctgccaatgggtgtttcttaatatttcggattgttccgaggtaattctccaccgtaccattgctgagcgtacctgtttttaattcctcctctgcccacacatccaaaagctgtccgactgtgagattatccgctttggcaacaaatttctttttctcataatcatccattgcctgacggagcagtttttcagtttcacttttgctttctgttccaacgcattctttctgaacaagattgccgcttgcgtcctctacatagaagcggtagtaccatttctttcctttttttcttacagatccttttgccataatcgtatgtctcctttcgatattagacaatcggaactgatgaaatgcttcgtgcgtgtaagtatatcataactccggttgtcttactataccgattcggaatcttcgtataagacttctgataaaagatttgcaagcctttgttctgctgtttttggtttcttggaatagagccttacaacgtctgccatctcattaaaagcattgatggtaggagtgatttcccttaagaacataatctcattatattcatcattcgattcaaaccctattgttttggcaatatccgtctgaccatcattccccttgaagtttttgcaggcgaactgaaaggaatccaaaaacagaccatattgttttaacatcagcagtaataaatcttttgaaaaagcatcttcttctttggtaagggcaagcggtaactgttccagaatatctcccatcgcatcacgaatctgtaactctctcttatccgtaatgtcggtttcatattcatctgtttcccctttgagccattccacagatacatgaagtgcttccgaaagaccttccagcaccatttttttcgtattgtcaatcgaaccattctcataacgcaggattgtagaagcggtaacccccatcttttctgcgacataaggctgtgtcagattcaattccagacggcgctgttttattctgctccctatcagcttgcgtaattctttatctttcatgctgactgcctcctttttcggtatgtatgaattatagcattgttttttcaaaattgcaatatgcaacttaaaaattatttttaatatttcgtaacgcttgacaaaaagatatgaaaaggatatacttacatcacaagaattgcataatgcaatttataaggaggtgattatatgacgcaaagaaaaattgcattatccatcgaagaagctgctgactatacgggaatcggcagaaacaccttaagacagcttgtagaatggaagaaacttccagtattaaaggttggtcgcaaagtcctgattaaaaccgatattctggaaatgtttatggaagcgaatgaaggtcgtgatttgagggatagaggaaatgtaaaagccgtaacaagaactgcggcaaattaaaaaggcggcttccaaagaaaccgccaaaggttctatcagaccgaagccatgatatacctacacgcaagaagattataccatgtgcttcttctgatacgcaaccgagaacttatgtttgtaaaagaaaggggaatgtaatcatggcaaaatcaacaaaaagttatgaagaacgaatgcttgaaatggaaaagaaggaacaggaaagccttgaaaaagcaaaacgatatgcagcacagaagaaagaacttctgaaacgaaagaaagccgaagaaagtaaaaaacgaacccataggctctgtcaggttggcggtgcggtggaatccgttctcggtgcgcctatcgaggaagaggacatcccaaagctgattggttttctgaaaaagcaggaagccaatgggaaatttttttcaaaggcaatgcagaaagaaacacataccgatatggaggaagtgtaatggcgggggggggatgagtttttcattcccttcattgctttttcatgaagggcgcatttatggacaaccagaggtcgtcccaataagtttgccacaagtggcaaccggtctgcgctcacgcttgccgggctcgttccgtcggcggggctttcagccagacctgctcatgccgcaggaggcactcttcgccagagaggcgcattccatgcaggctgctatgcgcagggcactcttacgcagagggcgttccggcaatgctgctttttctaaaactgaaagcaatgttgccggaaatctatgccggatacgtcagaaaggaggaatccagacatggcgatttttcattacacaatcaaaatagtcggacgaagtaaagggaaatctgttatctccgcttccgcatatctcaatggggatgtgatgaaaaacgaggaaaccgggcgaatcagttattacacttctaaaaaagaagtggtctacaccagtctgatgatgtgcgaaaacgcacctcctgaatggcagatagtaccagaagaaaatataaaacgctttcaaaaatctgtccgatacaaaaggtcagaagataaagaagctgctttagaaaaatttaaaatcacatttcagaaacaacggttatggaatgaggtattgaagattgaaaaaagtgcagatgcccaacttggcaggtcatttgaatttgccctccccaaagaatggagcagacaggaacagattcaatatacagccgactatatccaaaaaacttttgtagatagaggaatgtgcgctgattggagtatccacgataaaggggatggcaacccccatgtccatctgcttctgactatgcgtccttttaacccggatcattcttggggaaagaaagaagtcaaggattgggattttgtcagagataaaaacggaaatatcgtgattgatgaatcccatccgaactggtggcaggataagaaaaaccctgaccgtcatggaatccgtatccctgtattagacgaaaacggaattcagaagattggtgcaagaaaccgcctgcaatggaaacgggtgctgaccgatgctactggatggaacaatccaaaaaattgtgaactatggcggagcgagtgggcaaaggtgtgtaatgaacatctttctttgcataatcaggtcgatcaccgttcttatgaaaaacagggaaaactccagattcctaccatccatgaaggtgctgacgcaagaaagattgaacaaaagtttcttgccgggcaggaaataaaaggttcgtggaaagtagcggaaaatcaaatcataaaacaacaaaacacgttattgcaaaagatactggacacctttggaaaagtatcgggtgcattatcattatggaaggagcgattaaatgacattagaagaaagccgggaaattatacccttaatggagtccatgattgggcaaatcgaagaacagcagaccttaatgacagaaatgattctggaaatgcagaaccgggacacccaactctctcttatgcaggaacagaatcagaaattgcaaaaattaaacagcgagttatccgagctgctcaacattttgccaaataccgaggaactgctttccaagatggaagaacagaaaacgaagatagaacttttggaaaacgaaaatcagcaatggcagaaattggcacagaatctgaacagcgaaaacagtttattgctgaaacagaacaccgaattgctgaactggaacagcaaataaggaaaggacgtgatatagatgaacgaatccagagaatcaaagaacgccgaacagttggaagaacttctgctcttgaccgaggagatacaagaagaactggaacagaaagaccagcttatcgtggaactgaagacgcagctcagcgaatctctgaccttgaacgagaaattaaacaaagagaacagagccgggaatattcaagcattaaagaacgacttgaagctggcagacagagcattgcagatcgagaaagagaagctgcgaagcgcaaacgtcacgataggggaatgtcaagataaaatacgatgcttaacacaacaacgggattatgcccggacacatcagaaaatcgtagagataccggtagaaaagccggtactctatgaaaaatgtgaagcctgtgaccggacagcctatcagaatgaaaaagcgaaatacgaaacacaaaaagagcgacttgcaggacagtataaagcaaaaacggtaatattccaaacaaccttgttccttcttgcatggtattcgctgacaaccactctttttcaggcagtacagtcagatgtgttcctttccgattgtaaatcattcttccatgatgcagcgtcattcatacaaacttttatcggatggacgattgctgccggacattctgcggcacagattagtaccaaaattccaaatgcgtttatagccgaaatcatatattggttattgctgatattggttgtcggaatatgcgtagcaggaacagggatactggtgatactgatagaaataaaggttatagaattatataagaaaaactgttgggattttattactctactgatgatactgacaagtgctgctgtcatcatttattttggagaatccatcaaaaaaacactgtcagtaaatcttctattgctttttgtactttcgcaaggagtatatgttggacttagatgttatttgaaaaatcagttaaataccaagctatattgatcaaaatatgataaaaaacgtataaaagcaggggataaaaacacacatcgtcccctgctattatattatccttttccaatttctagtaggatatgcctgtttcattatgcttttttaaaagccttagtttgaatgctttactgtatttcttcctagacataaatatgctccacatggtacataaaaaaggacatggcaatacctccttgataccaccgtatccttgaaaaagggcgactttaacacaccctccgtattctcatttttacaaaagaaaacggcggttttgattgttatttcaaaaccgccgttaaaatggcatgagaactttctacttcataagcggttttttttcatgcttatgaagtagagaatttttaccttatcgtaaattcgcaagataaattatatgtatcgtaatcccaatctctttcactttcaaagaacgcaaattgtttaatcaaacgatagtgtccagcaggcaattctccataaaaacttttaacatcaatttctaatgttaatcgttcgttaggcttaataaagcaatccttttcattgctctttgaggggtcatcaagctgtttaagttgataccaagtgccggattgttcagcttctatttcaaaataatctggtgaatattggtattctttatcagaagtattttctattagaaatgaaaggtgctttaagtctaaatccttttctgtactcattgaaatcttcaaatcgcccaaagtgtcaagcgcttcttcacttccataaggagaaacctcatattcttcggaataatcttgtactacatgattatcactgtcctttgcttgactacacccaacaatacacaccaataacaataaggttagaaacatacatattatttttttcatttgtccttatctcctttcttttaaatttataatagcaataaaatgtctattttcaatcaactttcattgcaatttattttcactgtaacacatgctccccctgctttattattagcaatttggatatttccgccatgtctttcacttaaaatcttactaatattcagccctaaccccaaatgttcagtagctatatctttcgatgatttataaaatggtaatgtcgccttttcaatatcaatatttttaaacccgcaaccatcgtctgaaacagatataactaaattatcattctctattactacgctaatagcaatatcactttttgcgtatctaatactattagagagtaagttttcataaatctgcatgactgtatctaaattgataaacaaggttatattattaccgcttgtagtaattgaaaaatgtttgtcataacaaagtgcttctgctgtgttattaaaattatcaataagtgaatgaaatgtaatctgttgtcgtggaatatcaatatcctctaacctgtataagttcgtcatagcatttacatatttttcaagacgtgaaatattttttgacattactgatatttcatctaatatttcttgttgtgatactaagcctttgggaataaaggaaagcagcatagtagcatgaccctttagtaaagtcaaaggagtgcgtaagtcatgcgaaaaagcagcatttagacggcgctgttcagcaaattgtcgaaacatagtttcattatttttcgacaaacagtctttcattttttcaaaggcatgacaaagtttccccatttcatcatttaatggatatgataacgtaaaatctaagtcatttgcttcaattttatgatacgcattagttaatagcttaataggtttcgataatttttttttataaaaaaatgttacacaacatatcatactaatagataatacgataggaataattgcaatatttaatgaacctaaagcactgtcaataagcctatcccggtttgtaaaattaggtaaaacttcgatatatgaaacatggttcggatagacatattcgtgtactgggcgttctttttgataatcaacattgaacttgcatatctcgtttcctttcgtgtcaaatattgtgtattttgtttggtcattactataagtggcggtaaatgagccattttccggtatatcatacctcgttgacagattttcatacttatagtttaaatttattctgtatctgtcaaccattgaaattaaaagtatacaaataattattccaatcaacaacgaaaacaaagcataaagaacaaaggtcattctaatactcatgctatttaaccgattgaacaatctgcttctctttaatttttccatctatatccgcacccccaaacagtttcaatgtaaggtctatcgcctaaagataaaaattttgccctaatacgtctgatatgttctgtaacaactgtattatcaccaatgccgtctaatccccaaactttttcataaatagtttcccggtcaaaaacaattcctttgttttgcgaaaggaaagatattatatcaaattcctttttggtaaaagccatatccttattatgataaaacacaatacgtgaggaataatctataaccatatcttcatcaaattgcacctttgaagatatattgtgtcttttttctctgcgaagatgtgctgcaatgcgagcttctaattcatcaacagaaaatggttttattacatagtcgtctgcgccaatagaaaatccttttattttatcactatcttcaatgcgtgctgttaaaaaaattatagggcatgaaacataatcccgtatcctttcgcaaacagtaaatccatctatatctggcatattgacatctaacaaaataatgtcaggttttttttctacttcttttaatgcagcatttcctgctgttgcagtatataccgtatatccaagtttgctgaaatagcaatacagcattgatacaatttctttttcatcgtctacaattaaaatactctgcgccataaatatgcctccattgtgaatatctgatttaagattatcaaacaaaaatctatttctaatcaatttctttaattttcgatgtcattagttattatatatggcaatatgagttgtagcaaccttactctacatgttttatgctctattactatccacactatgatgtgtgtaatcatatcccgaaagccataccaaacaaagcagtctatggcagatttagaaataagtcctatgattattgaaaaataagaaaatataaaaattagagtgaagtaattatattacaaaaatgaaaaacgggagatacacagatattgtgctatctcccatattgtttttagtgtcatatcaaggctcatttattagtggtaaaattagcgtttttctatatttctcaaaatgcttgaaagtaaagtgttcatatggataatcgaaaatcagatataaacttttgtttaaattgcctataattcaagtgaatcttctgcatccacccacatctgtaaattgccatcaagatataatcttgcatattccaaaggctcatccacagccaatgaagtaagcgcacattctgatccatatgtggttttcaaatttttttcagcttcccaacaattaatgcgaagcatatatccggcacttgtgtaaacatcaatactatcgtggtttatgttgtattctgcataaattgttctcattgtatcttatctccattttttaataatcatttacagagttaaatatcgaaaacatttcattcagttcaccatgtcgttattgttatatgttatactatgtacgaatttttctttcccttaatttttcccatattaaggttcatgaaaaccaatgagagaatataatacaagggaaagagtaagggaaagttcacttgctacaaacttagtattttcaagggtttgtgaggaatttgataatcaaatataacagttattaaatttcctaaaataagtgaaatatcaactggaatttctggatgcgtataatatgcgaaaaaaacttaactccatcttaaatatagtgctgagtttcactgccattctttaacaccattttcaccacaccaagcaatgctgcaaacaaaacaccagcaaccggccatacaatccatgtaatatcccagctcatcgtccagaagctccatgcaaggtaaatcgctgtagtcaagcaccaatatacaccagaaaacgtgtcagtctttttcttaaacagtttttcttcttttgtatattcgccttcctgaagaagggtatcgtaactgctttttaccatcccaacacgaaccaacagattcactcctattgcaagtatgaatagcagcaatccaacggaaaggccacagtaatagtcagacgcttccatggatccggcaataattgtcggaatcactgccagtatacaaagcactaccccaacagctgttcctctgataaaaatcggttcataggaatcttttttttctcgtactattccagatacaccatactctgtttcaaagcattcttttttaaaatgttccatatgtgattctcgcattccatatataataaacaaaaagacggctgccgcaaccattccaagcaaaaaaacacatccaaatactgttgccagagattccgaaacatgaaatacgccatcttctgccattgtcacaagaacaatcaataatattggacttgagatacacatacttgttgcgtttgccactactttggatccatttcttttcatgtcaagaaattcatttgcattctccatagttacttttttcaacggttctgcatagctttcagtactttcgtgataagtgatattttctgctttcattttatcttttaataggtaatctgtactaacacaaaatagctccgacatctgtaaaattctttgcaaatctggaacagctcctgcactttcccacttagatactgcctgtctggatacgcccaactgattggctagttcttcctgtgaccatccattcttttttctttcctctgtaatcttatcagctaaaaccatttttttctccttttgcagattttatgagctcaatataacagttttgctgtttgcattccaccatttcaagctgtaaatctgtcaaccagcagttgcaaatcacaaaagaactctatgaattccgattgagatttcacctgttttaagaaatttaataactgttatattttgttattaaattctccgcaaaccattgaaaacactggattggtcgcaggtgagctttcccttattgtttcccttgtgttatatcgtcccaccagtgtttacgaactctgataagggcaaatacaagggcacaagaggtccggtggacctctgctctgtgccgaccgaagcggcagcggagaccaaaaaaattatataaaacagtataacacaaaataaaagtgacatggtgaactgattgaaatgcttctgatttttgtagcaaataattgattgaacgataaggagataagaaacgctgagaataatttcttctcagcgtttccgacaactattttctttcctttgacaccttctcacttattctctgatagatttcctttgtctctgcgtcattttccccatttacaactaatatttttccatctatgttcatgacaacatatgaatggcaggaggcatgagtgtagcggatataatctccgaagatatcgtttttgaagtttcccatagcatacttcaggtttccaagaccattagttctgtaaccattatcgttctgcaatacattttcttcataagaaatgctgtcaatttgcgaatactccactgtataatcattccatccttttgcttcaatgttaaaatcacgatcattacaacgaatctgaatgcttccacaaaacaaagtccatatagtaaacacaatagttgaaattgcgatgatcagatatatcacacttttttttgtattatactgaatttttaagccttctccggttgccagctttttcttataaaaaaggtaggagtagagaatgctaatgattgcagctgccataatgcttataatatacacaaccagtgcagccatgctttccccaaaaagtccacaaagcatacataaaatacctgatgccatccataatttgccgctgaatctatgtgttgcattccagttttcttcatccattaaagaccatacaactcttattcctatggtattattctgtttcacttttggcaaataatttccaataaccataaacagcagtccagttccatagtaaattactgccataaacagattttccatatctgcacccatattgaccagtcttgtaataccattatagagtaatgttataattggtataatccacatcgtcattcctataatcttgcggctctgctgtctgttccggttatcataaaatattattgccaccagcgcacaatccgtcactacaaaaaacacatttgcccacatgctctgtgtactagtgaatcctactaaaaccccgatgagcattaccagaacagaacaaattaatgaacctctatatttttttatcatttccttcatcgtccgatactcctttcaaatctataatccacaacatgacatcttccaatacggaagtgtttaattcataataaataaattttccctctcttttatttcggattaaatcagcctccttcaatattgccagatgtctggatatagaagctcccgttactgaaaaatgttcacatatctctccagcagaaagccgtccattcttcaataaatttaaaatctcacgtcgtattggatctgccagtgcttttaatgtatcttgtatacccaagaattcatcacgctcctcatttaacatttaacctaattgttaaatgtattataatgcaagatatgttatctgtcaacgactaaatttttctaaaagaacgtgctttgttcattaagggcagagaggctttttgtccctctgcccttaataacagataaagcactgatttcttatatcacgagagatatgagctttatcatacaatgcctgttcttctttagaaaatgaattaaatcctgaaacaaattttgctgttttttttagtttttgataaatgcttgactgtaaaccttgtttatagcttattattaagtaaaatagagttgctcgaaaggagggcataatatgactataaaagacgtagaagagcgaacaggtttatcccgttctaatatccgtttttatgaaaaggaaaaacttattgagccttcgagaaatgaaagtaatggttatagagattattctgaaaatgatgtggaaaatataaagaagattgcatatctacgtacattgggaatttctattgaagatatacgaagtattatatccgaaaaagtaacattgcaggaaatgcttgagaagcaaaaggaagtattaaaaaatcagattactgatttgaataaggcgaaactcatgtgtgaaaaaatgctggatgaagaaagtattagttatgaaaaattacaggtagaacaatatgtaacagatttgcatgactattggaaagataatcgaactgttttcaaactggattccgtcagctttttgtatatatggggaagtatgcttacctggactatgattaccgcactatgcttgattattggggctttgtcttattctaagttgccgacagaaattccagtacaatggagtaaaggagtggcaacatccctagttaataaaaactggatttttatttgtcctgttatatgtatcataatccgttatttattaaaaccttttatctatgcgaaattgcagatgaacaattattatggagaaattataacagagtatttgacaaattatatgtgttttattgtgttgtcagtggaaatcttctccatactttttactttcggagtggtaaaaggtgttgttgtactgttatttatggacacggcaatttttattggattgttagtagttggtttggtaaaaatggatttgagagggaacgaagttttatgattcaaattttatatttcagaaataacaataagatactatttttcccacgcctactatgagaacggcggctatgagatagaaattgcatatactggcgaataaaagaaccgctgttgcatggtttattggcttccatgtagctggtattcggctgaggtattgaaaaagataattttcaataatttttcaaaaatcagaatcgacaattcatgacaaatcaaccctgaatcggggaacgtttctcatagaaaagaactacaaaaaataagaaaataaaaacggaaagccattgtctgtagtataagtatttgttattatgaagtaaatagcggatattttacaaagtaaagcttaatctagagaatctgccagtggaaggcctctgtagataccaaggtatacaaaaggagaatgaaaaaatgaaaaaagaagacatgtcctgtatcgactgcgcagtaaaaaactgcaacaaaatggataaaacctatccggatttctgtctgacaacacacatggatgaagaagttctaaatgaagctatggaatgctacaatgaagacgagaaccgcaaagtaacaatcgctgcagctgaagtagagtatgagaattactgcaaacatacccgtgtcgaagaaatcatggattttgcaaagaagattaatgcgaaaaagatcgggatcgcaacctgtgtcggattgttgaaagaaagccgtatcctggcagatatcctgcgcagacatggctttgaggtgtatggtgtcggctgtaaagccggaacacagaagaagacatcggtcggcatccctgaatgctgcgaaggtgtcggtgtgaatatgtgtaatccgatcctgcaggcaaagcttctgaacaaggcgaagacggacctgaatgttgtggtcggactttgtgtgggacatgacagtctgttttacaaatattccgaggcactgactacgacagcagtgacgaaagaccgtgtattggggcataatccggtggcggcgctttatactgcggatagttattattcgaagttgaagaagagtgaagaagagtaatatttctaatttgggcgtttaaagatacataaagatatcccattcaagcatttctctttttatccaacgaaaaaaagaacacacaacactctgtatgttctctttctgtatgtgaagtccaatattatactttgaagtagctatccaatcctttgaactcttccgctttcatttcttttgtaacatcagcatagatgttcagtgtagttgaaatatctgaatgtccgagtgcgtcttgaatgacctttatatttactccagcttcacacattcttgttgtaaatgtatgtctaagcgagtggcagctaaaatgaggaagtaacacatcaggttcatcactgtgtaaaaactgctcatcattgcaatcacggataattcttcggattgctttgttgaatgttgcttggtaccgagcattggaacctgcctcatactcgccggagtcttcgttgtatttacattgaaataacagccacttttacttccctcggttctgtggtcataatatacaagagtatgattaacatcaatcattccactttccatatcaatatcacatcagtacgtctgctaaactgttattcatagccaaacctcaacctccttgtgcttagagtagtagtaatgtatatcaaaaggcttttacatattagataaaaacatgtaaaatttcttttacatagcttaattgtggtctatttagcttgtttcttgactactcaggaaaaatatttctaccctcgccccacctgtattttcagaatttgaaagtttaatacctccaccatatttttcagccacagtttttgcaaaaaatagtcccatcccataatgggcttcgccatttctacttgtgtcatccataaaaaactgctctgtgccatgcaataatgcttcttttgtaaatcctgatccgctatcctccacaatgaatgtcagacggccatcctgctcctttgcgtcaatataaatgattccattttcttttgtatgctccactgcattctgaatcatattcattacggcccggaacattggatcataagcaatcgttacctttttatcactttgtcccgccttccaatctattttctggtgatagatttctaccagtccgagtgcctgttcctttatatctgcgaaaaaatcttctaacctcaccgttgtataggtaacatcactgcaattccatgattttgtgacatctatcaactgttttacataactttgtatctgtgttgtgccgttcaaaacataagtgatattattcttctgttctgtggtcagttcagtctctgaaagtagttctgcatttccccgtacaatcgtaagaggtgttttaatatcatgcgccaaagcagacatctgctgtttcttttcctgctctgttttccactgcttttctaaagattctcgcaatgcatctcgcatatcatcgattgccgataaacagtcatcaaactctttgataccggaacaggatgtctcatattccagattttgatcctttatttgtccgattgcgtctaatacaggctgcatctgctttttgattctttttccaaaacgtatggacggaatgatgataatcgctaccgctccaatcacagacataataatcatcacattctgtggtcctataaaatgctccctcaaaaaagctgaatgatattgaggtgtcaggcgatattgcaatacaacatattcattttcccttacaattactttataaaaatatttcccggatgcgtttccgtactttgcaacattccatgctatctgttcgtattgttctgacagatctccacctattttctctccattctctgaaaagattacataatcacaaagtgcgggaatcatctcagcagtcactttatctgcacgtagaatcgtatcatatgcttcattaatcttttgctctgcataatttgccggataaatacagcccacactaatcaaaaggtacagcagcagataagcaacaatcaccaaaccaactaatgatccaagcatgaccagtacatatctcataaaaatcctgctgagtgcattgcttctctttactcttcccatttatatccaatcccccagactgtttttatcggtgtataatcataatccgcaaattttgctcttatatttttgatatgcgtgattatagtactgtcattactctcattgtcaaagccaaagaccgcttccaatatctgttccttcgagaaaacctgtcctctgtttttagccagaaattcacagatttcgtactccgctttcgtaagaggaagttccttatcatcaaccaatagtttcttttgagatatttgaatacagaccctccccaaaaccatccggacagaatgttccctgtgctctcttctaagatgtgcattgatccttgcccgaagttccatcactccaaatggctttgaaatataatcatctgctcctaaagaaagtccgtttaccagactgttttcctccgtttttgccgtaagaaacaaaatcggacaatccacaagtgccctgattcttttgcataattcgaagccatcaattccaggcatcataatgtccagtaaaatcaggtcataacgatgtaattcttccatattaatttttagtggattacttactttggtaaccagatgtccatccttattcaaaatgctttctatcatttccaaaattgccggttcatcatcaactgccagtatttttgccatagtttccctcgattctattccgatattctgtttccttcccagtggtttacccaccaaaaatagtataccatactaatccctgtaaatattaagcaacctggtatgaatgacaaccattcacctacactagtttctcccaatacagattgcagataagtatatggtactctacccgtccagcagacaaatacatatttccacacataatctccaagtccggtaagcatcaatgcactaattagtcctgatataatccctgctccaatggataccccttttccaaactgaaaagccagaatcagctgccacagataaagtggaacactgcttccccacagcagcaatgctgcaaatatacatcctttcatgatttcgatatcgcttgatgcgattcttccaaatccaattccgaatatgattgctgtcaataggatagagcacaaacacaaaaccagtagcatcaacagtttcgataaaaatgctgcaggtttatccggtaaagacaacagattttgaaaatcacctgcattttgttcctgttccatcacacttgctgtaaaaattccaataagtaccggaagtcctgctcctattgcctgataaaatgcgatcactttcatattttcattccatggtgaaaaaaagtaatatattaaaaatataacgctggttataatcggaatcagtaagtgtgccagaatcacagatgttcctttcatctttcgcaagtctgcattaagagatcttccaatcatcttatttcacctctcttctctcaaaccatttcaaaaacagaaccgttacaaaaacaaaccagatgattgagagacacattcccggaacaatgactcccgtatccaaaagaggattccctgcttctgcggcaagtccatttggtaaaacatgaagcaacgggcacatcattcgcatagggattgcagaaacaagtacataccagattctggtttgtgatattaccacaccgctgacggtaataaataggcagacgaacaggtttacaatcattccaaatcgttcacttaaaaataaagctaccggaatctcccataactcagaaaccgtcagaaacaatactgcaatcaacgctcctccaactggaacatgtgtcgttagaagaaagcctccaagcgttgctcctgcaaacacaatcacattagaaaacaaaatcatgtacccaatataaataattttccccagcaacaattttcttatgtctgtgggaatagtcattaaatgatagtattttatctttttctcctgcgccacagaaagataacaaaatagagcaatcatccccggcagcaaaagtgtataccaccagttccaaacactttctgcataagcatttgtcatcccaagagtaaatataaatgccatggcaaatgtaagaagaggaaatcccaagataaacttttttcgcatggttcttttggctttttgatgttctgcttttataatattaaccatggatttcacctgctttctggttttttcttaccacattcataaacaaatcttcaagattatctccctgccttaatgctccttcgtatcctaagattccacctgaaataatcccgactttatctgcaagtaactgtacctctgagagaatatgactggagagaattacagtgattccctgttccggaaaagaccggatcagctctcgtaattcctcgatgcctattggatctaatccattcgtaggttcatccaatatcaaaagttccggttctccaagcaatgccattgcaatgcctagtctttgcttcatccccaaagaaaactgtcctgctttcttctttccggtgtttgtaagtgatacaatctgcaagacctcatcaattctgttttcatctgtaccaagcaataattgtcttaccttcaaattctctctggcggaaagattttcataaataggcggattttcaattaacgctcctatttttgataaatctttcctatccaaaagttttccatcaaagtaaatctttcctgcagttggtttcatcataccggtcagcattttcaatgtggtagatttaccagcgccattcggtccaagcagtccataaatctgtcccttttcgatattaagtgaaacattatttaccgctttctgttttctaaaatatttacatagattttgtgtctgtaacatcatttccatctttactatccttccttctatatttcatttcttactgaaatataacctaacagaaaaaaataaagatttgatgaagatttattcccgtatggaataaaccatcaattgaatatcattatcagaactcggctttccactgaaatcagcaaagctgttacaaatacgaagtcctaatttacagaatatctccgtgatttcatccaaactatataactattataaaaaaagtagcaggcattaattgtctgctacttttaactaaacgtgttctctttaaatcaatgattttatttttctgaattttgatatcttttaattctagtataactttgcgcctgccggaatgtgattatcaaccataataagatgcagttcttcatcctctgaatctttcagattattcactgctgaaagcaacataccacaagattcaattcccatcatttttctcggtggcaggttggtgattgcgatcagtgtcttaccaactaattcttccggctcatagtaagagtggattccgcttaagatcgtgcggtctgtacctgttccgtcatccagtgtgaactgaaggagcttcttgctcttcggaactgctacacactctttaacctttacggcacggaaatcagatttgctgaatgtatcgaaatcaacctcttcttcaaataaaggctcagcctttacgttggagaagtcaatcttcgcgttgtctttgaagaatccgttgttgtcgtttgcagttgcttcttctactgctccggattttcctgcttttttgtcagagtcaagactcttcattgtcgggattactttatagatactcgttatatctctgtaaatccctttattttatagctttcatatacgttttagttctccatataaacttatatcaggtcgtatcagattacccttttgttgtactttgcgttgtaccaaagctattttgttgtagtactcattgtataatgatttttccattatattagattcaaatctcaaaattggctgtactggaattgaattcctttccttttacttttctgagattaaaagaattgcattttacttgctaattcttctaatgaatcttttttcttattataattgacttctgtatagatatctaatgttgtttcaacgtttttatgtcccataatctcttgaataacttttacattcatatcactctcacataaacgtgaacagaatgtgtgtctcaacacatgacaggaaaagtgtgggataatgatcggctctctgtgttctctcttcgcatctataatctctcttgcattatgtgcttcgtagattcttttgattgccagatttacgcaatgtggattatgaagcaaacctaatttatttgagaatataaatcctgaaacaccatcaagctcataggtacaaaatccgtctttcttctgtctgtcatattcatttttcaaagcattatagactgcatccatcattggtatctgtcttataccagcttctgttttcggtcttgaaatcgcaaatcctgcaactccatttcttgtataataggttgctgcatgatttacactaatacatctccttttaaaatcaacatcattccaagttaatcctgtacattcgccgattctcattccggtaccaagtaatgttgcaaataatggataccagtgataatattcaggaaatgttctgatcgtatccataaatgcttgttgctgttcaattgtaagtgcgtgtcgaatccctttattctttccactatttcgtttaatttcagccagaactccgtctgtaggattttttctaataatgtcgtctctaactgccatatcaaagattggatgtaatacagtatgaattgtatctaatgtattgattgcaatatccttctcatttaacagatgataataaaacaatttcacatctgtatacttcacctcagtcaaaaacttatttccgaaatccgctcgaatgaatcgattgaacatatacaggtaattggatctcgtggtttctctcagattatgttttgtactcatatatctgtcaaatgtcatgttaattgtcgcatgaccacctacatagtaatccaatccatccatctgggctttaattaactcttgttctttctctcgtagtgtaaaaagatctttggaatatacataacaacgttttccatagggattcacatatgtatatatgtacatcccatctaattttctttggctttcgcccttttgaagaactcgtcctttgctgtccttcctctgctttacttttgctttcgccattgctttcactctccttctcggaaaggaaagtagttgtccattttagttgtctttttcttctttattacataaaagatctagaccttcaattacaacttgtgatattgtcttatgatgctcagctgcgtatttcttaatccgctcatgatcactgaccgttacccgcacccctaagattttctgttttggatcatccactggcggtctcccgtctttatttgccataagcttaacacctccccgaatcatcatacaaatattatacaatagaatgattaaacgttcaacatttgtttaacatttgttcgagataattatcggtacaattccacaagatctggagtaaacttctttgccattccttcataatctcctggaattctatattgttcaagatacgcctcaaagatgtccgtatttacaagcaccttattacccattttataagttgctcctgccatctttgtatgttcctgtattctcgtcagtcccatactatagagttccgctgcttccttgtaagtaacaaatctttttctcacgttaggatctgtaagattttgctttttctgttctctcataaaaaggctcctttctcatattagtaggtttgtttcctcacctctaatatctacttggagccataaaaagctgattacaaaaaagattttctaaaaactacactttttatatcatataacaattcagccaggatccaaagtattgaacagtggatccgttcattgtccgtgccactgtccaacactttggatcatacaaaatctgggatgtaaaataatccctcaatttcacattagttcaactcttggaccacactcaaacccttgattttcctggctttccagaagttggaacaaaaatccaacctttggaacaataatcgctaaccattactaacaggatacgcataaagtaacatgcctttatgccaacaaatggcactttcctatgtcatgtgcgatagggatttttccctaagacccaaacctctaattggcgattgtacaacttttggtcaagttgaccaaaagttccactcacgaattttcaaggtacataagcaaaattcatgtgtaaagtttgagtattttattcttctatactatgttatctcttccaaccattttttatgtaaactctcaaccgactgcatcaaataatctggcccatatggacaactttctgcttcttctttcgttgcctctccagttaaaaccattgcagtttccaccttcgcattgtgtccacaaagcatatctgtatataagcgatctcccaccactaatgtctcttcttttctatagttatttcgacttattgccaattcaaccatatctggttctggttttccaataaaatggggtattctttttattgcgtgattaagcatctcacaaattgctccacaatcaggcacatatccaaattcaatcggacatacataatctggatttgtcgcaagatagtccactttcttcgtactaagcaacctgcatgtatcagatattttttcataagttagctgattatcatatgaaattaaaacacaactaatctcttcatcctcacaatctgtcgtaacacgaattttatttttctttagttctcgaataaatgattttgtacccataacataaatcaattctcctggatgatattttttcagataatatactgttgcataagatgctgttaggaaattactgtgatttgtcataattccaagttgttgaaaaaaaagaatataatcatcaatactgcgagttgcgttattggtaataaatatatattttccaccatttttttcaatatcactcaaaaattcttttgtacctccaatcaactgatttcctttacaaatagttccatctatatctaacagaaataattttttatctccaagcatctaccctctctcactttcatctcgtatcattcgcgctttatccggataattagtaataaccgccgtaattcctgaatctattaacatctttaggtctgattcctgatttaccgtccacacacgcacttttaatccgctctgcagatattctttcaaaaaatgagccatcttcacatgataaactgcgggatgtaaaccattaaccccttcattttttgcatacttatcaatctgcagaatcacgtcactatatagataggccgtttctgcctgaggtgcaatttctttaattttcctaatactgtaatgattaaaggatgaatatatcacttgatcttccattttagttttcttcacaagatccacggtcttttcttcaatttcaggataccaatatatgcctgttttcaattctatatttacggtcaagctttctttttttgcatataccagcacttcttccaaagtcggtattttagaatgctcatattcctgatattttcctttcattattgtaaagtttttcaactcttctaacgtataatccttgacatatccatgaccatttgttacacgatcaattgtttcatcatgaataactaccggaattccatcttttgacagttggacatccaactctattccttccgctccttgtttaactgcaagtttgaacgcatccatcgtattttctggagcatatccacttgctcctctatgtgcaaatatctctgtcatttgttttcctctttttttaatataatccatcattatcaatagtaatggaagaatcagggactttctttgtccctgattctctgtctgtcatttattcgattgcaattacagtcttgtttcttcgcagatattaattatttactgtattataatcatcaatagatttattaattgtatcagccatatttgttacggcttcatcaacgctttcttttccattaagcatgctctcaatctcagattctacagttgctcttgcctctgggaaaacacttaataatgctccacagtattctggtgaagaatcatgtaactgatcaattgctgtctgaaactgtggatactgtgcaatattatctttgaaggtctgctcttcatgtgctgctgttgtaactgggaaatatccggtctgtgcattccagtaagcctgtgattctggtgaaatcaagaattttacaaattcccatgttgcacgaagtttctttggatcctgattattcaaagcccacaaagaggcaccacctatagatactccaccttcatcgctctctttgattttcgggaaatatgctgttccaacttcaaatttaccattaacatcctgaaggatctgtttcagtgatgctgttgaaccaagagtgattgctgattttcctgctgagaaatctgccaatcctgcgtctccaccttttccaacaattggtgcatatccttcttgattaagggtctgccattctatcaaaatattttttgcagctccgtttttatcaaaatcaacggctgttgcgacgtcgtcacgtccatttccattgtttgcataatccagtccttgctttccaacaaactgttcaaaaaaccagccataaataccaagagacattacttcacttgcaccaccttgattcatcagctgatcgccaatctttgaaatgccttctaaactatctgggacttctgtgattccagcttgcgcaaacatatccttattgtagtacatgattggtgttgatgagttgaacggcatagaataaagcttatcatcaattgtatagtaagctgcaagattcgattcgatctgtgacacatcatagttatccgcatctaccatttcctgcattggaacaacccaaccagactcaatcataaatcttgttccgatttcatatacctgtaccaaatctgcacccatgtttccaatctgcgcacttttcagtttgtttaaggaatcatcatattccccctgatactgtgcttctactgtgataccatattcattttcttcattaaatttatttaccagtgtgtcaattgcctgtccgttaacgccacccatagaatgccagaatgtaattgttgttccgtcaacatcatctgccgctgtcatttccaccttttcatctgtagatgtatcaccggtctgacttactgacatttttccatttccacatccggacaaaacgcccattaccattgttgctgtaagtaataatgatactagtttcttcttcatttctactctcctatttttgttttttgtagttatacttatttatagattcagaaatgatgctttctattacacctttccgctcctaccttaatattgttatccctttaccgctccagaaaacattccgcgaatcagctgtttttgtccgacgataaaaattgaaatagacgggataataatcataacaacacctgcaatcattaatgttattgactgggaatcgatgctgtccagcatactaataccaatctgaactgttcgcatattgtttgatcctgtaacaagtaatggccacatatacatattccatgcattaataaacgtatatactgccatcgctcctattgctgacttcgtcagtggcattaatattttcacaataaacttaaggtttgtacatccatctaattttgcagactcatacaatgattttgggaatgtcatataaaactgacggaataagaaaatccccattgcggatgttaaatatggaataatcagaactggataggtgtctaacatcccaaggttcgccaccgttaaatagtttgaaataatcgttgcttctccaggtaccatcatagttgccataactattgcgaatagaattccttttcctttaaattccaaaaacgaaaaagaaaatgcagccaaagaacaagaaattatctgccctacagttataaaacctgccattataaacgagtttacaataaaacgcaataacggaactgttctcaatgcatcaataaaattctgaactgttggatgctttggtacaatattcaattctgttgtaaacaactcatttgatggcataaatgcaatactaattgcatacaaaagcggaagtaaaataactactgcgaatacaatatttgctacgatacgcaaaactgttttactccttctttttgcaagcgcttttgtgttcatcttattttttaattcaaataattcttctgttgtcatacgaccttccactggaattgccatactatcaatctgattcattagtaatttaccccttttctttccattcggaacattacaagtgttataagcattataattataaacaaaataacagactgagcagaggcacttccaaaacgataattaaaaaacgcatctctataaattgaatagacaattacgtttgtcgattcatttggtcctccttctgtcaaaattttgatctgcccaaatgactggaatgcctgaatgatattaacaaccactgtataaaacatgatcggcgacaatcctgggagtgtcagatgaaaaaattgttgcactccacttgctccatctacagaagctctctcatagattgtttcatcaatattccccaaaccagctgaaaagtaaagaaaatttattccactgttaagccaagccgtcagaatcgcaacacaatacaacgctgtacgtgggtcattcaaccaattaatatctaatccgagaagcttattcacaatacctaccgtagggtgaagcataatttgaaaaatcatagctgctgaactagatgcaattgccataggaagtgcatatgcagtactaaacacacgaattcctggaaatgctttattacacaacaccgcagctactaatcctagtaacattccaccaactacaacaatcaaaacaaaaacaactgttacttttaaactgttctgaaatgattttgaactaagtaaatcaatgtaattctgtagtcctacaaataattttgcctgtcccatcttattcgtcataaataagcttaaataaatagtcttaaaaaaaggatagaataaaaaaactgcaaatatcagcatactaggcaccagatagcaatatggtgcaaattcaattttttttcctgacttcatttttaattcctttccctatataaaatatttttacctgtttcaatatcaaagatatgaatctggtctgtatcaaaaaataactgtatcttttctccaacacgagtcttgttttcaggacctaatttcactgcatgtgttctgttttgctcctcaaaatatagcattacctcagccccaagcatttcacgggtcactatctcttcttcaattcctacactgttcaaatcgatttttcttttttttgcttcctcatattcataaatatcttccggacgaatcccaagaatcactctttttcccatatatttttctctaataagctgtgcatcatgattattcggataaatctttttgattgcattattaatcgcaaaaatcaaaacaactttccctgcttcttcctcaacatcacatgcaataaaattcattgaaggcgaaccaacaaaacctgcaacaaatttattaataggattactataaatattctgtggtgtatccacttgctgaatttcgccgtctttcataaccacaattttagttccgagagtcatagcttctgtctgatcatgcgttacatagataattgttgtatctaattgattatgtattttctttagctccactctcatttgagctcttaactttgcatccaaatttgataatggttcatccatcaaaaatgcttttggttttcttataattgctgctccaatagcaactctttgtttctgtcctcctgacaatgctacaggttttctcttcaaaagcggttcaatttctaatatttttgcaatttcctttacccttttatcaatctccttcttcggcacttttcttattttcaaagaatatgatatattttcataaaccgtcatattaggatatagtgcataattctgaaataccatagacatatctctttctcttggttccagataattacacagctttccatctatccacaattcaccatctgtaatttcttccaaacctgcaattaaccttaatgttgttgattttccgcaccctgaaggtccaacaaatattacaaattctttatcatgaatatccaagttaaaattcttaaccccgtaatgtgctgaatcaaattgcttacagacatttcttaatgccatttctgccattattctcctccttcgcagttagaatcactgttttcttttttagttcattgatgtccgagagttatcctatcagatttcagatctgtctctctatcttgtttctgtgaaatatatgttaaatattcaaactcgcacataaattttgcttatgcactttgaaaattcactccctgacaataattgaaaaacctgtatccatgtgatatcagacatttcatcggaaaaatataaaaaagttcaccaagagaccgttcatctcttgattcacggttttcaatggataacatcatatatctggtaaagacagctgcggtatgggctgtcattgcatcgtaggaaatagatctacattctttactcaaatggagatatcataattaacttcagcagaatcatagtggcaaattgtattcggcgcattatatagagccgtaatcagatatgctttaatgttcgcaatctttgttgtgtttctttccatgcatccgatcacatattccaaatgcgattttttcaatttgaggaacttacttttcactaagctatacggataatcttctccagcaatacggacctcttgtctaggtacacagactacatcgcagatgatctgatacaattcttcatacatgtcacgatgcttccattcataatctagcatcataatatcataatcaatattttctctgattaactccatatatactgctgtttcatccatcacatcaatcttatctattgactgatatgattgattgatagaattattattatttatattattatctatttctatattactcgggtgtaatttttccactggtaccagtgtatttttttcactactccccggttcaaaactacactggttacttttttctactggtgtagttttttcaccagtagaatttttacactggtgtactttttccactggtttagtttcttttttgtacttaaccacaggattgctctgatcgcaaaaatcctgttctctctttgatacaaagttctttacataaataatatttgctactcctggctgctgaatcatataaataagaccaatttcttccagctctttcaaaagagagcttgccgtctttcgactaacatttaaatcttcttcaatattgttaagggaatacttaataaaaaccttatttgcttcatcaagccatcctcttttttttgaaagagacattctatcaagcattaacccataaagaagctttgcattattcgttattcctttaaaacgtgcatctgtgataagagctttcggaagtctgtaaaatgtaaactgctctgcttctctcccgtaataaaaatctagttttaatttctccattacacttaatcccctctcattttatcctgcgctctatgctttatcatagagcgctccaaattcacataatttttttaccatatcacaagttcttcttttttatttggaaactacaaataaaacaggaacctctcctcagttatttctgaaggaaagattcctgttttatatccttttcccaatactctttagagcaatccgtcacttgagcccatatttcttcatctcaaattacgaatttgttgtagtaagcgttgtagtaaacactttttcgccctaaagcatcttgatcttttttattctaatataactttgcaccagccgggatgtggttatcaaccatcaggagatgaagttcttcatcctctgaattcttaaggttgtttaccgctgaaatcagcataccttcggaagcgatccccatcatctttctcggtggcaggttcacaatagcgattgctgtcttaccaaccagttcttccggctcataatactcatgaataccacttaagatcacacgatccttgcgtactccgtcgtccagtgtaaacttcagaagcttcttagacttcggtactgcttcgcaagccaggatcttcactgcacggaaatcagattttgcaaatgtttcgaaatctaccatttcctcaaagattggttcaatctttgcattagagaaatcaatcttttcgtttgctgtaaaaaatccattattgtcatctcctgctgttgcagattcttgaccttttttattctcgcttgcgcccactgttttcattgtcgggaacagtaatacatctctgattgcctctgctcctgtcagcagcatacacattctgtcgataccgaatccgataccacctgtaggcggcataccgatctccagtgcgttcatgaagtcttcatctgttgtgttggcttcatcatctccctgtgcaagcagctcttcctgcgctttgaaacgctctctctgatcgatcgggtcattcagctctgagtaagcatttgccatctcccatccattcatgaagaactcgaagcgctctacatattctggattctctggtttcttctttgtcagtggagagatctcaaccgggtgatccataacgaatgtcggctgaagcagatgctcctctacgaactcctcgaagaagaggttgaggatgtcacctttcttatgtctctcttcaaattctacattatgctcttttgcaagttctcttgcctgctccagagtctcaacttcattccagtcaacgcctgcatatttcttaactgcgtcaaccattgtgatacgctcgaacggtttaccgagatccatcgggattcctttgtaaacgatctgtgttgttccaaggacttcctgagcaacaaaacgatacatattctctgtcagatccatcatgccgtggtaatctgtgtatgcctggtaaagctccatcagagtgaactctgggttatgtcttgtatctagaccttcgttacggaatacacgtccgatctcgtatactttctcaagtccaccaacgatcagtctcttcaggtacagctcaagtgaaatacgaagcttcagatcctcattcagtgcgttgaaatgtgtctcgaacggtcttgcagctgctccaccggcatttgctacaagcatcggagtctcaacttccatgaatccttctccgcttaagtacttacggactgctgcaaggatcttggaacgtttgataaatgtatctttagagtctgcattcatgatcaggtctacgtatctctgacgataacgtgtgtctgtatctgtcaggccgtggaacttctccggaagcatctgtaagctcttggagagaagtgtcatcttctcggcatggatagagatttctcctgttcttgttctgaaagcgaatccttcaagtccgaagatatcaccgatatcagatttcttgaaatcagcgtaagcgtctgttccgattgcatctcttgctacgtatacctggatgtttccctgtaaatcctggatattacagaaagaagcttttcccataactctcttgaacatcatacgtcctgcgattgctacgtgaatcgggcttgcatccatgatgcttcttctctcttcgtaatcattcttgagagcctcttttgcctgctcttcatccataccttctacgttcggctgctggtgatcttttaaaatctcagcctcatgtgcctcatagagatcttttacttcgagtgaatggtgtgtctggttaaactttgtaatctggaaagggtctcttccgttctgctgcagttctgcaagtttctcacggcgaacctttttcagctgattcatatctggttcctgtgtgttcttctgattctgtcccactgtctgttctccttccgtttctatctgcttccgcattaatttttatatatcaatgcagaaatagttatttttatattgtctttttaagcgaattcagacctcttaatagtaagaggtctgtcctaagctgattatgaacgtttgatatcaagtactttgtactggataactcctgcctgtgtctcaacatcaacgacatcattgattttctttccgatcagtgcgtgacctaccggagactcattggagatctttccttccagactgttcgcctctgtagaaccaacaatcttgaactccatctcttcatcaaatgtgatatcgtaaacctttactgcacatccaacattgatcttattaagatcaacttcatcctctactacaacttctgcattcttcaggattgcctcaagctcctcgatacgggcttcgatatctctctgctcgtctttcgctgcatcatactcagcgttctcggaaaggtctccctgctctcttgcctctttgatcttacctgcaacttcttttctctttactactttcagattctcaagttcatcctcaattgcctttaatccggcataagtaagtaatcttttttttgcctctgccattgttcctgcttcctttctacttccttaccgtcactgcctgttgcaataacgtttcgtttcctacaacatttacagattctctgcaaatcattttctgtctatacttttcatgcattcaaagttccttctctatattttgtctacaaatattataatgtgagttttaaaatgcatgtctgctgtctttttctcctggacgccaatcgttgtatcagcgtccgtccgcaatttcaatattatactcaaactcgcgctttctgtcaagcaatttcactctcacaggtcacttctacgcagtgtatgaaaagcctttaaaaccgcctttttccgaactttttccattctgttttccaactgttttccgaagtcccggagcttcttttcctatagtctctgaaagagcagttcttccagttcctgataggactctacgcgattgatttcttcacgcaattttgcagaacctttcaatccctttgtataccatgccacatgttttctcatctcgcggataccaatgaattcacctttgtatttcaactgtaatctggcatgacgaagcatcatatctcgaacttcttcttttcccggacgttctggtaatgtgcctgtctcttcatatgtgatcatctcggagaagatccatggattcccctgtgctcctcttgcgatcatgattccgtcacaccctgtctgttttaccagctcctctgctttctgtgggcttgtcacatctccgtttccaattaccggaatagagacagcttcttttacctgacggatgatatcccaatctgcctgtccgctgtaatactgttctcttgtccttccgtgcacggctacagctgctgccccggcctcctcaatgatcttcgcgatctcaaccgcattaatgcagctgtcatcaaatccttttcttatcttcacagtaaccggcttatcaattgcctttaccattgcactgacgatttcataaaccagcttcggattcttcataagtgcagagccttctccgttacgtacaaccttcggcaccggacatcccatattaatatccataatatcaaatggacgctcttccacacgttttgccatctcactcataatcttcggatctgatccaaaaaactgcagtgacaccggctgttcatccgggtggatctccagaagtgattctgtattcttattattatataaaatcgcttttgcgctgaccatctccatacacaaaagacctgctccctgttctttacacaacacacggaatggaagatctgtcactccggccatcggtcctaagatgtaacggtttggcagcgtcacatttcctattttcaactgtttcatcatattctattctttctaatctataactattcttcttatttgactttagtatcatagtaaataactgccgaaaagtcaacgtacacgatctgttctttcgcattcacacaaaaaagtctgaataaatccggcaatcacaaagcttttgcaatcctccatttattcagacttttttatctgtcttttaatatctcttgatttttcttgaagctgtcttctcaaattctttctcgcgaatgatcagactataaatctttttatatgccggtgcaccctgattgtattcatcaatcagtttttggagttctacacggacttcctcttttctttcaagtccctgcttttttgcgtactcttcatccggatatatttctgcctcgatcactccttttgcttctcttactaatacttcctgtacgagtcttgaagaacttaatttattctccagttcttccggtgagacattttctccattctttgtaatgatcaggtttttctttcgtcctgtcagatagataaacctttcttcatctacatatccgagatcccctgtgcaaagccatccatctttcagtgcggtttttgtttcttccggcatcttgtaatatccttgcattacactgcttccgcgaacccacagttctccatctacggtctttgcctcgcagtttggaagaagttgtcctactgaattcttttttacattccatgcaacagttgtactgatgaccggtgaacattctgtcattccatatccctggagaatctggattccaaaacgttcgaacagctcaatataatccgggttcaggtatgcacctccactgcagatcgtatggaactgagatccaaatactgcttcttttaccactttttccggaaggtcttttacatcttctaacttttttgcaaaagtttcaatcataagcggtaccatcaggatcatattcggcttaaataatttgatattttttgctacacgcatcaaagagtcattgatacagataattgcaccgagagaaattcctttcaggatatccatactcaggcagtatgcgtgatgaatcggtaaaactgacaggatcacatttctctctgggagcttcatatccagacatgtcgcgttctcaacgagatttctgtgtgtcagcatcacacctttgctctttcctgttgtccctgatgtgaacatgatcgtacagagttgatccggagtaatctctgttttttctactcctgtgtcctcatctatcgtttgttccatcattgattttgtaagagaaagtatattaccctcattcgcttccttctgcatagaaaggatgtacttcagttttgtacacttttctttcgctgcttcaatcacatctttacggatctcatccacaatcaggattgttacatctgcacggtcgataagttcacacagttcttctgccggaagtgacacatccaatggtactgcaacatttccgccgtccacaattccaaaataggaagcaatccatagataagaagtcgcaccgatcaatgcgatatgactttttggatctcccaattttttcaataatgctgttattctctcactgtcttctctcaactgtgtgtatgtctttgccgcaatttcattttttcctattttgtaacggattgcgtcttcatttccaaaacatttttctgcatttgtaagaatatcgcgaattgttctatattccattttcttttccctctacttcaaagactcaagatacgctacagcttctccgactgttcggataactgctgccttgtcctgttcaatctccacatccatctcgtcttctatttcaccaagcatgctcataaaatcaaaggatgtgaatccaagatcttccataaaacgtgattccggcttgatgtcttcctgttcaatttctacataattacaaataatatctactaactgctcaaacatgattttttcctttccattctgtcctgatcgtgattctcaacatgatccggatcatctttcttttatacaagctttataatttctccaattgtaagttcaggattttctgctcccttgaacataattttacataaatagtaatacagatattccaactcttctcttgagattgcttttttctgatgttcaaagttgaaatccaatccattatcctccggtcggtgcatgactgtcagatacattgcctgtgttgtcattccattcggataccattttgtcttatattgaattcctccaagatcttccagtcctttctcctgcaatgtcataggctggtaagtcaaagacatcggctcatacgtcagtccattctgtggctgtggatatgtcctggagcgatatgcgaaatattctgtcgggtcataatttgcatgacggaataattcattctgcttatcacggatttcatatactgcatcgataaacttcacatcttctgaaaatacagtacgaaacgggaacgaatgaattcttgttccaccggatttcttttcttttaatgtagcccttctggcaatcgcattattgatcgatacatcctcctgtccattcattttctggaagtaagtacgtaatcccatcaataaaagacatgccagggatacccggtacttttcgcagaaatccatcagacgtttggtcggttctgcttccaaatgaaaaatatccaatgcagaactcacatcatctgtcgcattaaatgcggaacgaagctttggatttttaaacatttccctcgctgcatccagcttatctgttccattaacaccgttataaaccggctctgatgcttcaatcagttccctgaaaaattctctgtctcgctgctgtgctttacttccggcttcatatgcgagatccctctttacctgatctatgtaagaacacatatcctttggatatgggacaccttcatattttgcattacagtacagctcaataatatccttcagaaatgtaatcagcgactgagcatctaccaccatatgatgtccgaggaaatacactccgttgaatccatctgaagtgcggatcattttaattttcgtcatcagtgaatcctcgaatggaaatggtacagttgtccatttctgcatcgtatcagctgcctcttccatagtcacattggagaaatcaacgaactctatctcccgttcttttctgtcctgctctgcacttacaacatactgatatacattcccctctttgtcctttgcaaagcgtatccgcatcccttcatttctctcatatgctttgtaaatggactctcggagtacatcccaatccagatctgtgccaattgtcaggcttgtgccaatattcaatactgccgcattcggacaaaatggcagataatacaaatgaaatttttgcgctaccgtcagtgggtatacaggatatccttttcttgttttcatcattctatgattcctcctataaatgaatccattgctccttcataagcttctctgtctttataataactttcgcagtgtcctgccccgtggatgatcagcttctgttttggagatttacaatttttataaatttcttcagacatactgcatggaacaaatgtatctgcgtctccatggatcaaaaggacaggaacttttgcttttctgacttcacgggcagaattgcactcatccagtccatatcctgcctgttttttattcaccgcatccgcaatctgtattattggaaacgccggaagatgatacatactgtgaagtacatgtgtaaacactgccttgggcgaagtaaacggacaatctgcaataattccttttacctgctgcggcaaatcaagcccgcttgccatcaatactgtggcgcctcccatagaattaccatgcaggaaaatctgaacattttctccttcctgtccaatcacccattcaatccatcgatatgcatcataacggtccttacatccgaatccaatgtatttcccttcactttgcccatgtgatctctgatcaacaagaagaacgttataaccacgcttcaaataataatttgaaatacttccataatccgcaagcccctgactcgtgtagccatgaaaacaaatcactgcttttttgcatttcttatcttcgacatttcctgatccccggaaatacgttccatgaagcttcaaactgtcttccgaccggatccagacatcttcatgaggctgctccatcatccactccctgcattccttcatctttgagaaatactgttcccagtctaccccggacatcttcatcgtgcgttctgtctttgcgttataacgcatcattgttcttctgtaaaagtatgcacttccacctgcctctgctgatacgattcccaccaggcctgcaagtgcaagaagttttccgtaatgcatcatctttttcacctttgcttcctttttacagttatttctgtttctgtgttttctttattgcattctgttctgcttttctgctatcaatcagttttttcagatacaaagctttatcaatgttgccttctactttcaattttcccagtgttactgccagaaccggatccagctttccctcattgatcttaaataatgtctctgctgaacaagtaaaaatcgcatctctgtcataatactcgtatggttccacatacagctttccttcttttacctctgcataaaagattccctctgcttctcctgttacattgaactgatatgcaagatgttcattcacagtacttacatctgcttccatcatcatcccttttacttttgaaaacatgtctgcgtatgtcatttttctctccctctccttttcagtttttcatttttcgaccgatggtcgatttgctatgtttttaatctatcactttttcgacccgtggtcaattatctatttcagacaatcttttgttttaaagtgtcctttttttgtcctcttttttatttctattttattggttcttccgactttattgtgctatacttaaaaggatatcagtcaattcccgtaatctggaactggccaaatatacttacgaatatacgaggcggacttctatgccaaaacaattaaaatacgataagattctggatgctcttcaaaagcttctggaaaccaaagaactttctaatatctctgtcagtgagattgctcagactgctgaaattggaaaaggaagtatttattattatttttcttccaaagatgcaattcttgaagcactggtagaacgcaattatgaagctccaataacaacagcaagacatcttgcagagcaaagagagatttcacctttcacacgcatggctctgatctttcaggcctgccgaaattcctctgcggcttttttaaagacacagccatcaactacaaaggctgcaccggagcgggcttttcttcatcaaaagtacatgaatcatctcatcgtttcactcaagccggttcttgcttccattattgaacaagggattgcacaggatttaatccgctgtgctgaccctgtttctcttgctgagatcgtactgattgtactgactgttaagatggataacaccttaataccttcaacagcagatgagattgaacagacaatctctgctcttgtctctcttttggaaaaaggaactgagaatcctgcgggatcgctaaactttctgatggcacagctgtaagcagttttctgttcgcggcacctgcattacacaacatatcccaccattttgaattgctgacgatgatatgataaatcatgagacgaaaggagtgtttttatgattattcgtcctgtttttaatatattattgctccctgatatcacttatttttttaaacgtgatttctttccgggggctgctgcagaccagattgaagtcggtacagatattctgtttccatttttgaaaaatgaagtggatgagactactgttactatagatgatatttacccggtcggtatgtctgcgagagtcgaatccatcagtgatgatgacagcatccagattcgtacattagaacgtgtcagtcttgatgatattgagctggatgagaacggacagattacagctacagcttccatccgcccggaggtagatgatctacctttagaagaagagaagcagactttcacaaacctgcggaactcgcttctgaaatttgttcagaattatcaatgggggatctgggcaagaagctacattatccagagaaagaatatctatgaccttggttctgctctttcagattatctgaacattacttccgaagaaaaatatgcaattgttgagacagattcccgccgtgagcgctgtgaactgattgagaatgcgattaaggaattcatggaagtggccaaagtttcttctgaagcacaggaggcacagaaaggtgaccaagagcagctttacagagaggctgcaattaagaagcagatcgattaccttcagaaagaattagatgagatgcacccggaaaatatttccgatgtccgtgcttttgaaaaaaagatccaggaatccggcatgaatgaagatgcccgtaaggaagcggacaaagtcctgaatcgtatgaagcaggaaggaaaagacagccatgaatatgggcttctctatgactatcttgattttgtcaccagtctttcctggaagcatccggaatttacaccgattgatttaaaccgggcagaagagattcttgatgaagatcattatggacttaagaaagtcaaagaacgtatcatccagcagattgctgttatggcactgaaccggaaacagtatggttccatcctcctttttgtcggtgcgcctggtaccggtaagacaagtataggacagagtattgcccgtgcgttaaaccgcgaatatgtccgcatcagtctcggcggtatccgagatgaagctgagatccgcggtcacagaagaacttatatcggcgctatgccgggacggatcatggaagggattaaacgcagcggcgtttccaatcctgttgtagttcttgatgaagtagataagcttgcgaaagattatggcggagatccggcaagtgcattgcttgaggtgcttgacccggagcagaacagtacatttacagaccattatatgaatgttccatatgacttatccaatgttctgttcgtctgcacagcgaattctacagatacgattcctgaaccgcttctgaaccgtatggaagtgatcgatttcccaggatatacggcggtggaaaaattccatattgccagaaagcacttacttccaaaggcaatggacgctatgggaatccaaaagaaaatgttaaagataacggatggtgcattgcgcaaggtcattgaagattatacgatggaatccggagtccgtggacttaagaaacagattgatatgctttgtcgttccgctgctgtgcgtcttgttaaaaaagaggggcagactctgacagtaaataaatcgaatctgaaagactatctcggccgtaagaaactgcatcatgaccagaaattaacttccacacagcctggtgttgtcaccggacttgcatggacacaggcaggcggtgagattctgtttatagagacaaagctgacagaaggggaaggaaaggtgatcatcaccggacagcttggagatgtcatgaaagaatctgtacagattgcactgacacttgtgaagtctctttatcctaaagaaagcaaggttttccaggatcatgatctgcacattcatgtgcctgaaggagctgttccaaaagatggtccatctgccggcattacattaaccacagcacttgcttcccttgttaccggaaaggctgtcagcccggattatgccatgaccggtgaagtttccctccgcggaggtatacttccgatcggtgggcttcctgagaaactgatggctgcccagagggccggtattacaaaaatactgattccttttgacaacgcagatgatctcgaagatgtagctgctgaagtaaaggataagctgaaaatcactccggtgaaaaaggtcagcgacgttctgaagttattgctcggataaaaagtgacctatcgttaaacggaaactatgagaaacaaaagcccatagcaggaattctgataagttcaacaaacttaccattcagattccgccatgggcttttttatagttttaaaattcgatagataaaccgtaatctatttatctgactatttattcctctgtctcttcttccatctcttctccaagatagaatactttgtaaaacatttcaagagacttgaaaagctcttcctttgtgtcctgcagctctttgatcttcagtacacttccgatctcatcgaatgagaaatcaccctcgttgtgctctactttcaactcaaggtttccattctcatcaaacaccaacaggagaactcctccaacatccgctgtatacaacacacacatgatctgcaattcctgtttcactgcttccggaagagattcaaattccgggttcagataatatttctgctcataggagctggccgcacacaataccatttcttcatccataatttttacaccttatatcactgcccacagtttctgtaaacagtacttacctttccatattttccacattcactgcataatcccgatgacttattcacattccgtaggtcttatccacctggttatacatacccatatacgccgcgcaccgaaacttctccggcatacaccgcctcttcggttccatcttctttccgaacgatcaattctcctgtctgattgattccaagtgcgtaagcattgtactgttctttcgcgccaagaatccggacctcacggtctttattaaccagtaattcgctgtaacgttctttcagaccggacagatctccatgttcaaggaaaaccgtgtagttctgttcaaagcgtttcatcactgctgcgatcaacggtgctctctttaccacatgtccacattccagtctgagtgatgtcgctgtctcacggatctcctcagggaactctgtcaggttcacattgatccctacaccaatcgttacatgattaatgtaatcgatctgagtgctcatctctgtcaggattccgacgagcttctttccattaatgataatatcatttggccacttgatctttacatctgggtttccacaggaatctccgcaatccatgattccctctgctacacttaatgccatcacaagcgtcagcatcggcgcctgatccggttcaatcttcggacgaagcaacaaggacatgtaaatgcttgaacctgacggtgaatcccaggaacggccccttctccctcttccggctgtctgcttatctgctaccgcaagtgtaccttccggtgcaccttcatctcccatctgcttgatcctcagatttgtagaatctaccgaatcgtaataaacgatgtttcttccggcccactgcgtatccatcaggctatcgagctcttctttcgtcatcacatccggactatctacaatatgataacctttattccgcacagcttcaacctgatatccttcttcctgcagctgacggatcaccttccagactgcagttcttgacaccccgaacttttcacaaagctgctggcctgacacatatccgtccgcttccctcaataattttaatatttcagctttcattctaattccacctctcatcagacctttatacaaaagaaaggtgtctgtcccatctctggaataacagacaccttctgctcattcttattttccacagaagccggtctgatcttcaactcatttatcataccaaacttctgctgatttctcaagttcatcaaatacattgcgcgttactgttcacacgatgtgcgattacgttctcttagaactcgccaagtgttgcaaccattacagccttgatcgtatgcattctgttctctgcctcatcgaatactttggactgtgcagactcaaatacttcgtctgttacttccatatcttcgattccgaaacgctgtcccatctctgctccgatctttgtcttcaggtcatggaatgccggcaggcaatgcaggaaaatagctgtatcttttgcatttgccataacttcttttgttaccttatatggtgaaagttctttgattctcttctcccatacttcatccggctcgcccatggatacccatacatctgtatagataacatctgcgtcctttgttccttcttttacatcttctgtcagagtaattgttgctccggactgtgcagcataacctttacaagtttcaacaagttcttcgttcgggaaatattctttcgttgtacatgctacgaaatgcattccaagcttagagcatgcgatcatcagggagttgcccatgttaaatcttgcatctcccatgtatacaagcttgcggcctttgagttctccgaaattctcacggattgtcagcatatctgccagcatctgtgtcggatgatattcatttgtcagaccgttccataccggtactcctgcatattttgcaagatcttctacgatttcctgaccgaatccacgatattcgattccgtcatacattcttccaagtacacgggctgtatcttcgatgctctctttctttccaatctgagaacctgatggatcaagataagttgttcccattcccatatcatgcgctgccacttcgaatgcacaacgtgttcttgtacttgtcttctcaaagatcagtgcaatgtttttgccatgataatgatccaccggtactccgtttttcttcttctctttgaggtctgctgccagatcaagcaggtatgtaatctcctctggtgtaaaatccttcagtgtcagaaaatttcttccttttaaatccatcgttctcgtcctttctattctataactatatgaatcagaaccctctctgtccttctcttcttcatatctttgaacctacattgtaaccgatgaatttagtatactacatccatgtataaaaatgcaactaaaactttattttactccattttatacatatttattcagtacttatacattcttttatgcatttttattatttctttcttctctgtcttcctgcttcgaacatcagaaccgccgctgccactgccgcatttaaggattctgcctcgccttccattgggatacggatgagacaatccgcgcagtctgcaacttcatcacgaagtccgttcccctcatttccgatcagaaatgcacaaccagttgtataatcttcctcgtcgtatgcattttctccacgcaaatgtgctgcgtaagttttaatgttttccttctgcagctctttgatcttctccggaagatcttccacatagaggaacggcatacggaatacagcccccatcgtggaacgaatcacctttggattgtagacgtccacgcaatctttgctcaataagattccggttacacctgctgcctcagctgttctgaaaatagttccgagatttcccggatcctgcagattatccaacacaaccaagtgcggtgccttctgatttttcacctgcatcaggtcattcatcgtataattgagtctcttcacaatcgccagaattccctgcggtgtctttgtatctgacacataagcgaacacagtatctgtcagaagctcgaccggcgcctgtaatttctctaaaaattctttattcttctttgcaaagctttctgaagcatatactttctcaattcgttccgccggaatctcttctgtcattcttggtccttccacgagaaagattcctttttcatctcttaagcggctcttcttctgcagcttcgccagttctttgatctgtgcattcgatgtacttgttatcataatctatttctccaattttccaattttttcgagtactttatttgctccaaccaaaatcaatagtgcattctccggaagcggcatctgtggattaaactctacattaacatttccgtcctgcatgattcctacaactgtaactccatatttcgtacgtatacccagttctgccatactgtgattgatccacggttttggaacagcgatctcaaccatactgtaatcatttgacagttcaatccagtctgtgaattctgttgccagaaggcttttggcaacccggctgcccatctcaatctcaggatatacaacagtatctgcccctactttcttcaatatagttccctgtaacttattctttgctttggcaacaacctttggaattcctatttctttacaaagcagagtcgccatgatccctgcttcaagattctccgcaactccaataattgctccgtccaaattccttgttcccagtgcactcagagcttctttctctgtgatatctgccgtaatagcataagttactctgtccgagatctcctgaattgtctcctgtgatttatctacaacaatcacatcgcatcccatattttcaagtgtcaaggccacactccggccaaagctaccaagccccagaactgcaaactgctttctcatcgttttctccttctcatatactgcttcttatcttttctttatcccgtttcttttatcttctcttttatatttttatccaaccataatcttcgcttccggcaaagtacggaactgattcttcttatccacatgaccggaaaatataagtgccatcgtcattggtccgattcgtccaatatacatcatgagcatcagaacgacatgactgatatcactaagcaccggcgtcagatccactgtcagaccaactgttgccatcgcagatgtcgcctcaaacatcagatcaaggactttctgctgtggctcgatcactgtcatcaccgtcaccccaaacaaccagaagacaaatgtcacaagtgtgattgttatccctactcttataatttcgaatgtaatttttcttccataacattccgtatctttgtttcctctcaagacagaaatcgctgtaagcaagagaacagcaactgttgttgtcttgataccacctgcagttcctgccggtgaaccaccgacgatcatcagcatgcaggccagcagcttcgaaccattcgtaaggcctgactgagatatgctggcaaatcctgccgttctcgtcgtcacagactggaaaaaagccgcctggaatttccctgcagcgttcaatgttcccatcgttgccggattatgatgctccaacaaatagaatcccaaagttcccaaagtaagaaggaacaacgtcattgtcagaacaattttactctgcaggctcagtcttgtgatcgttcttccgactggccgttttcccttggactgtattgtcatctttatattcttcgcaagatcgatccataccggataaccaagaccgctgagaatgacaagcattgttgtcgtaattgtgatcactggtgtattgacatatctcgtaaagcttgaatctccaagaatatctacacccgcattacaaaatgcagagattgagtgaaacacggaatagaagattcccttcgcaacaccatactccggaataaactgaaatgaatatccgattgcgccaattccttctacaagaaatgttccccacaatactctttcaataaaccggatcattccttgaagtgtggacagaccataggcttcttgaatgacaactcgttccttcatatttattctttttccaaccagaattaaaaatgcagttgtacatgcaatgattccaagtccgccgatctggatcagaataagcagaatcacttttcctgccactgtaaattgcgcagccggcacaactgtcaccaatcctgtcacgcagacacatgttacagctgtaaacagtgcatcgatataacgaatcggctgatgatttgaaaatggaagccataagagcagactgccaagcagaatcacgccaaagaatccgattgatatgatcctcactgtattccattttgctcttcgtgcttttctcctgtcttcatctatataaaatccatacatgtctatctttcctcgctctcacatgacaattattaaacaccatgttaccactcccttttatcatctgcaagtaaaagctgataaaacgaaagatacgccactctgattcatcctcagaacagcgtatccttcgtttggcggtttatttaaaattattatatagtttgaatcatttttagtgatctgtagactcgatctctccatcgaatcccgcatcttttatcattttcattgtgtcatcgattccctggcctccggctgtcagataacctgatgcaaagatagaatcaacaactttgaaaagttccggttccaatcccttgaagtaaacttctcttcctgctgcacagcggatatcggacttcggaatcatcagtcttgccagacaaagaactttcaagcaatactccggtgtcagctctgagatatcacgatctgccagtcttgttcccggaatcggaagtaagaaattgatcggaaccgattccggattgatctcgcgaagatccatcagcatatcaacgatatcttccttactctcacccattccaacaattccaccactgcagatctcgaatccaagactctgaagcatcttgatattattcacacgctgatcataagtatgtgttgtacaaatctccggatagaaagaacggctgctgttcagattatggttgatacggtccaatccagcatctttcaggattcttgcctgcttctctgtcaggaagccgatggagcagcagatctgtgtatctttcttcttcatctcgcggatacggtctgcaagatcttcaatctcctcgtctgagaatccgattccactcaatccgatacaatgtcttgcaagatgtttctcatctaccaggtcattatctccataaagcttttcatctgatactctcttgtacttctcaatctctgcctgagaatccttagattgtgcacaataagcgcagttctgtgtacagtttccactacgaacatttgtcagaagctgaacgcttactttcttccctttgtattttgtacgaagtgcataagcacactccatcagactgtccatctcctcctctggaagattcagcacttcaactgcttcttctcttgtaagcggacattcttcatcccagtttttcagtaatgtatgaattgatctgtttgacatggtatatttccctttcttctgtttctatgatatgagtttcaaaagtaatttttgtcattcactgatgcaaccggattactccattgctatgtaattcccgcaatcctcaaatatctccaacgcttcttcagcattatcattctgttgatcttatttgcaacatatgaaaatagtatagccatgtctttttcgattgtcaaccttttctttatttgagttgacatctttattatttctagaacaaagaatgtgccttgcacattcttgcgcctgcggcggtcgcttgcgacatctacattgtacgccgcagtgcgcatccttagcggagcgttttttatatattaggaaagcactttcctaatatataaaaaagaaccccaccattcactggcagagtcctctctttcttcttatactttaaatctatatcccacaccccagattgtctcaatatattgaggatgtgaagtatcatactcaatcttctcacggatcttcttaatatgtactgtaacagttgcaatgtctccgatcgactccatatcccagatctcacggaaaagctcttccttgctgtacacatgattcggatgtcctgcaaggaaagttaaaaggtcaaattctttcgttgtgaaagacttctcttctccattcacccagacacgacgtgctgtcttgtcaatcttcaatccacggatctcgatcacttcattctgctctacattacttccgatcagtctctcatatcttgcaagatgtgctttcacacgcgctacaagttcacttggactgaacggttttgtcatataatcatctgcgccaagtccaagcccacgaatcttatcaatatcatctttcttcgctgaaaccataatgatcggtgtattcttctggctgcggatctgacgacagatctcaaatccatctactcccggaagcatcagatccagaatgatcaaatcaaattctccttcaagtcctttcttaagtcctatctcaccatcattcgcaacctcgacttcaaaaccactcagctccagatagtctttctcaagatctgcaatgctttcctcgtcttctacgattaaaatacgtttactcatcttctacgggtacctcctgatattttcttattacaaaatacatcgtggttccaacgccctcttcgctggttgcccagatctttcctccgtgctcttccacaatcttcttcacgatagaaagaccgatgccgcttcctcccttggaagaattccttgaagcatctgtccggtagaaacggtcaaagatattcggcagatcctttgccgcaatgccctttccgttatctcccagttctacctgaataaagtctcccacgtcctttacatccatcgtaatcttcacctttggcttatctgtatatttgatagaatttgatacgatgttattgatgactcttcgaagctgctccggatctacgatcaccttgctgtcctcttccataaagttcctgtaagtaaattcagctccctttgattccagttctacacttaaatcctccgcacaatctgcaaaatatcccttcgcagagattgttgtgaaattatacggaattcgattcgtatcgatctttgaataaagcgtcagttcattgatcagaagattcatctcattagctttattataaatggttctgatgtatctgtccatcttttccggcgtatctgctaccccatccataattccttccacataacctttgatcgctgtgatcggagtcttcaggtcatgtgaaatgttactgatcagctctttattctctctgtcaaatgctaccttttcttcggcctgtgctttcagtctgagacgcatctcttcaaagtcctgacagagttgtccgatctcgtcatttgattctgccttgatctcaaagtcaagattaccctctttgatattgcgtgcagctctctgaagtttctccagcgggaccgataccgatctgtagatccacaagattagaaatgctgtcgtaaggacaactgcgatcagatacagctgctgtatctctgcccctcttcccggaacaaatgcatgcattgcgatcagtgcaaatgttacaggaaagatcataacgactacaaaagcaataatcagtttggtacgtaatttcatagaagcatctcctttccgtattgaaaaaggtgcctgacactttatgacgggtgtcaggcaccttccggtgcttgtatcagatatttctatcttacagatatttctttaaatcgtcaaccttgtccagcttctcccatggaagatccaggtcgttgcgtccaaaatgtccgtaagctgctgtctgtttgtagattggtcttctcagatccagcatcttgatgattcctgccggacggaaatcaaagttctcacgaaggatctcaaccagttttgtatcagaaagttttcctgttccgaatgtatcaactgcgatagatgtcggctgtgcaacaccgattgcataagaaagctgaatctcacatttcttagcaagtcctgctgctacaacattctttgctgcataacgtgctgcataagctgcagaacggtctacctttgtacagtcctttcctgagaaagcaccgccaccgtgacgagccattccgccgtaagtatcaacgatgatcttacgtcctgtcagtccgctgtctccgtgtggtccaccgatcacgaaacgtcctgtcgggtttacgaagaactttgtctcttcgtctacgagttctgccggaataatctcatcgaatacatatttcttaatatcctcatgaatctgctcctgagtcacatccgggtcatgctgtgtagaaagaacaactgcatccagacgctttacagaaccgtcttcgttgtactctactgtaacctgtgtctttccatccggacgaaggtaagtaagtgttccgtctttacgaacctttgtcagctgacgtgcaagcttatgagccattgcaaccgggtaaggcatatactcttctgtctcatcagaagcataaccgaacatcataccctggtctcctgctccgatcgcctcgatgtcttcatctgacatcttgttctctttcgcctcaagtgctttatctactccgagtgcgatatctgctgactgctcatccagtgttgtgatcacgccacatgtatccgcatcaaatccatattttcctcttgtgtatccgatctcacgaacagtgtcacgaacgatcttctggatatctacataagcctgtgttgtaatctctcccataaccattacaagacctgttgtacagcatgtctcacatgccacacggctcatcgggtcctgtctcatcagttcatcaaggattgcatctgaaatctggtcacacatcttatccgggtgtccctcagttactgattctgatgtaaataaaatcttttctctttccatatctgttctcctttccgattgctgtccccacagcaatatctcactttctctcgcttgtgctgtcttcatttgcttacattgcccaaaactatgagaaacacgctctgcgagtttctcaagttatcgcggcagtcgccaaggtctcgtgcaagcacggactttggctcgttgctcgcgtaaatgaaaacagcccgcatcaagcggactgtcagtttatcttaacaatcctcttattgttcgaaataactcgctcaggttggcaccttcctattacgaggggttgccgcagcttcttagatcctttgtatctccactgctctgaataagagaaagtatcatctatttaattttgtttcgtatcagactatacaacaccttgttgattatgtcaataccgtttcctgaagttgataaaacttttatatttctatgattctgcatcaacatctttcaactccgtgatcactccggtatcatcgattgtaatattcggtgaaatcttctgcaagtgatcaaaaagtgctctctgggactctgcattattcagatactgtgtctggctgtctttctgctcacacggtgtaaaggacatctgcttcaatccttctgatgtaatctcaagattcagaagtcccgtatattttgtctcatcattaaaccagaaatcgcccagactgtatacaataggtccatcttctgtatattcaattccctgaagtacatgcggatgacctccgatcacgatatctgctcctgacttcaggaattcttttccatgctctgtctgtgttgaattatacatatcctcatcttctgttccccaatgaacatatgcgatcagataatcacattcctttgatgcatccgcgatcacctgattatactctgttgtgtcgtaagatgtaagaatacctgtcgttgaatctgttgcttccggtgtaaatttatactgttctccctcggaagctgccacaaatccgatcttgattccgttaatgatataataagtcggctgctttgcctcatccagattcgttccgcctccaacatgagtgatcttcgcctgatctaacagattgatcgtatcatccatcgcatctgcaccataatcgtaaatgtgattattcgcaattgaaacaatatctgtccccatctgttccagcaacttcatgcgttctggttttgcacggaatacataatacttatcctccagcggggttccacggtcactgatacaatattcatgattcaggaagaaaatatctgctgcatttgtctgatccagaattgtcttggaaatgcatttggacaagtcatttaccgtatcataataatcgagaacatatccatcttcctccagacagaggtcacctgctgctgtgatctgcacggttccgttctctgctgccttcttctcatagatatgattcttcgcagcggtagcttcatcctttaattttccttcgtatgtatctgacagaacatgcaaagttgctccaaaggaatcataaatatcctgcactgttatctttttattcttctgatagactggaaataaatcatccatctcttcagaatagttcttttccagccatttcgtaaatgctgtaacatcagacttttccgctgacactccattatccgtcaggaaagtattgtagcagtcattcagcgattcattcatctgtgcaatttcctgctccagctgctttttctgttctgctgccagtttctttttcttagccacattgactgcaaaggctgccagcgctatgattatgcacaacaaaatacagccggaaatagtcattcttcgtctgagctgtctgatcctcttttgtttgatttcttctctctgtctttttctccgttcttctgcctgttcaaattcattcatcgttcgttgctcctgctgttttcttgttaatatcccgccactgtttcattcgacctgcctgatcgcctattacgccataactcctgacatataaactgaaaacaggtatcagaactttcgttccgacacctgcatacgttcccacatcatatttcttcggattctgtctgtatcggctcgctgccggccgcagcttgttgtaaacagtaacctcggtttagccaacttttaatttgaatttctgaatctctttttcactggacactttctcgatgattccacccagacttctgagtttctcttcaaagcgttcgtatcctctctggatataaacaatatcatctacgatcgtaattccttctgttgcaagtcctgcgatgcaaagcgcagctcctgcgcgaagatccggcgcgctgactcttgctgctgtaaatttctcaacaccctcgattgttgctgaattgccttcaactttgacattcgcacccatacgtgccagctcatctaaatatttaaaacgattctcgaagatactttctgtgatcgtacttgttcccttcgcaagtgcaagcacaaccccgatctgtggctgcatatctgtcggatatcccggatatggtaatgtcttcacctgtgtacttgtcagacgtcctttagccactacacggactgcatcgtcaaattcttccacttcacatccgatatctaccagcttggagatcgttgcgtctaaatgcttcggaatcacattgagtactgtcacatctccgcgtgttgctgcagcggcaaacataaatgttcctgcttcgatctgatccggaatgatggagtactctgccttgtgcagggacttcactccacggatcttgatcacgtctgttcctgcaccacggatatttgctcccatactgttcaggaagttcgctacatctacaacatgtggctctttcgctacgttctccatgatcgtaagaccgtcagccatagctgctgccatcattacgttgatcgttgcacctacagtcacaacatcgaaataaagatgtgttcccttcagttcttccgcctctgcaacaatcttaccatactcaatgtctacatctgctccaagtgcacggaatcctttcagatgctgatcgatcggtctgcttccgatattgcatcctcccggaagtgctacttctgctctcttgtattttccaagaagtgcacctaacaaataataagacgctctgatcttcttaatatagtcataatcaatactgaaatctccaattgtatttccattgatctttactgtatgtctgtcaattctctgtaccattgcaccgattccctcgattgcctccagcatgacattaatgtcattcacatccggaagattctcaatcaaaaccggttcatctgccatgattgcagctgcaagaattccaagtgccgcattcttagctccgccgatttcaacttccccaaccagcggattaccacccttaataatatattgctccattttgcacctcaattgtccgattctgtattacttcccacagatcctgtgttcagtaacgatttattcttgtgtctttatctatacgaaaagaactatctatcttaattacaatataatccatacataactataacacaaaatctttcattgtggaatcccttttttctatgacggtaatattcacgctttattttaagagtaattctcaatagcatcaagtacattttctattgtttcttcaatctgacagccctcttcactgattgtcacatctgcatacttctcaaaaaggacttttcgctcgtcatacaggtcttttaatgtctgaccgtccttcaaaacaactcctcttttttgaggatttctgattctcctctttattgtctgataagaagcatgaagatatacaacaattccgatttctttaaaatgtttcattgcttcctcgcaatagacaacacttccgcccggagaaataaccgcattttctgcttttatatcacgatttacctgattttcaatttttaaaaacccatcatcaccgacttctgctatgatttcacgcagaagctttccttcttgttcctgaatcagaagatctgaatctatgaaaccttttccaagtctttttgctactacaataccaactgtactttttccgacagccggcataccgataaatataagattacttttcatctgtatctgttcccttcttctgaatccgtttcttttgttgtaatctgaatgattatatcatagattttcctggcaatgaacaataactgtaaattttttgtttcctttttctctgttcgcccctgcgtcggtagatttcctgatataacaaaacttccgccagatctcttaacatccgctcttccccggcaaacattttctcctgtttttttacattttcgcaaattctgctgcacatgatgcgtaactgcaatttatccgggtaaacatcaaacatcacactccccgtgtattccatcctgtcacattcctcttcgacataaggtagtattctctttggaagatccggatacaggcttttcatatactccaggtctgtcctttctgctctctcatcatattctgtctgtatcggataggccatataataaggcaatttctggtacatgttgctcactcccactgacaataagttgtgccgtctctgctgtccgcattcctgttgattgcagtttatagatccggcggctatataacgttactgttcacacgatgtgcgaccagcaacgcatctcgccattttaaatcgcctttggcgatggggcgagatgcattcaagtcaaaacacgcatcctccgtgtcaatcagcgaagtgattgacacgggagtgaacagtaactatataactactatatgattttccttactcaactgttactttcacacagattcttcattttacgatcaaaaagaaaaagaagtcctggcttttccgccggacttccttgcctgtaatttcattattcactttctcttaagattctgagaatctccagtctggtctccccaacgccgatcacatcttctctctgaatctctgttggacgatctaccaggattccgttcaggtatgttccgttcttggaaccatcatccatcagatacaaacagtcacctctctgtatgatcacacaatgctgcttggatactcttccatcctcatgcagtggcagatacttctcataattgtcattcctctttgctcttccgattcccacttcatcatagaatatgaagctatatttctgccatgtatccagatcttccaggataatcttccactgtcttctttttttagaagaacgcttcgctgaatccatagaaccgttctgccctgaactgcgtctcttctttccctgcggctgatcctcttctggatcatatccctgatctgccttgttacgctttccattcctggactgctttctccgctctgcgtcctgtgccttattcttttttacacttataaatgtactgcaaagaagtgcgatacttcctaaaatcagcagtaccataatcgcccaataccacatatgcattatcactcctatctgaatcttaatcgtactatatttttacgttctcggcaagcataacatgtatctttttgtcgaattttgtgataaaataagtagaaaccgagaaaataagtgatttttagaagaggtaatatcatggaaagaaatgaattgtgctggtgcggcagcggcaagaagtataagaaatgccatatgccgattgaagaaaagataatgatgcatgctgaacgtggtgagattgttccgacacgtaagattttaaaaactccattccagattgaaaagatcagaaaaagtgctgagcttaatacagcgatcctggatgaagtagcaagacagatccacattggaatgagcacacaggagattgatgacatcgtatatcgtttcacaaaagaacacggtggtatcccggctccgctcaattatcagggattccctaagagcgtgtgtacttctattaataatgagatttgtcacggcattccggatgagaatatcattctggaagagggagatatcatcaatgttgatgtatccactattcttgacggatatttttctgatgcatcccgtatgttcaaaatgggaaaagtatctgaacgtgcagagcgcatcgtccgcgtcacagaagagtgtgtgaagcttggacttgaggctgcgaagccttggggacatttaggtgatatcgcagatgcgatcaatacacatgcccgtgcaaacggatactctgtcgtagaggatatcggcggacacggtatcggtctggaattccatgaagatccttttgtcagctatgtgacaccaaagggaagtgagatgcttctcgttccaggtatgatgttcacgattgagcctatgatcaacgaaggcagccctgacttcttcgtagatgaggacaatgactggactatttatacaatggatgacggtctttctgcccagattgagtacatggttctcatcactgagaatggggcagaggttcttacaaaataataatagtaacaaatacgggatgaacagatattaaaactgctcatcccgtatttttattattcttgtataatgctctttctttatctgcaaaataccgttccacttcttacgacatcaatctcaatgcttctgccggctttaatacgattgctgaatgagatcccatattcaggacaatctctccatcttgtacgatatactcgtcatattctgtcgtataaccgttttcataagagtagatcagtcgtttcatccgtccttccatctctacacccgcataccataccggtacggtcactgtacgaagttcatcactgttattcacaacaacgacaatctgttcatctgcttcaaatcttccataggccaacagattttcatctgacgccagtaacttgatagaaccttttttcagcggtttctcttccttgtggatacggatcacttctttgtggaatgcctgaagttctttgtcttcgttcccccatgggaaagttctccggttatccggatcggtgaatccacaaagtcctgcctcatcaccataataaatcgtcggcgcaccgatccaggtcatctgcataataaccgcttctcgtaagattgccttattcacatccttttcagctgcttctgttccaagctgtgccacacgtcctgccttgtggttcgtacgtgtcaggaaacgagaatggtcatggtttgaaagttcattcattgccacctgaagagatggtgtcagcatacttgccataaaatgacgcatcgctccgacaaagttgtcagcatttccacacagatccggacgatattcatcactatgcttctccataccagtcaaaaaccaggtcagcggttccataaatgcgtcataattcataacgctgtcccactcatctccctgaagccaatcctgcggatctccataatgttctgctaatataattgcatccggattcgcatccttaacttcctttcggaatctcttccagaagatatggttgtattcattactgaatccaaggtccgctgcaacatcaagacgccatccgtctacgttatacggcggtgatacccattttcttccgatatccataatgtactgctcaagctgtggtgaatcctcataatcgagctttggcaatgtatcatgtccccaccagccatcatatgttccgttataaggccagagttcatttctcgcatcatggaacaggaaaaagctgttatatggactttctttacttacatatgctcccttcggatagtccggctgcggctcatagatacgttctctgtccatccatttgttaaaagagccacaatgattgaatacaccatccagaattacacgcattccacgcttatgcatctcttctaccagtttgataaacaactgattacttgcctcaagattgcggatatctcctgtgcgttgctgatactttgtcgcatggatattatcctttgcacctgccggaagtacttctccgtcatccacaacaatctttccataatgcggatctatgtaatcataatcctgaatatcatacttatgattcgatggagaaacaaacaacggattgaagtaaataacttcaactccaagatcctgcagataatccagcttatctaaaacaccctgtaaatccccgccgtaaaaattacggatatccattgcttccggtgcctgattccattccttcaccttgcggctcggtgccccaatataaatatattcgttatcctccacatcatttgtcggatctccattataaaaacgatcaacaaagatctggtacatcacagcacctttcgcccactcgggtgtcttaaatcccggcgaaataataaaatcataatagttttcttttttccctgttattccatacctactataaaaacagatttctgctccctgcttgatttcaaaacaatatcttaagatatcctcaccaagctgatactcaatctcgtaaaagtcaaattcaccgttcgtacgtgtcttccacataggatactcctgttctccgatgtgaagtttcacttcatcaacatcattgtgtgccgtacgaaatcgcaacactactttttcatttatctcaggctctgccggacagacataatcacctgtaccgtcacaaaacagtgcttctctattcacctgtttagcctcctttaactcaattcttaaaactattctaaaatagaaccaaaatacccccggccaacacgggatcgcccgccggcagagggtatcttattctaaatacatataatcaatatactgactattatccgtcaacctcactgtctgcaaacagtgcttcgaattcacttcttgttatcttttccttctcaagaagcagttgtgcacacttctcgagtaccggatgatactcctgaataagtgtacgcgctttcaaataacactcatcaataatacgtttcacttcttcatcaatcgttccggccactttttcgccataccctcttgatgtatgaccgaaatcacgtccaatgaatacttcatcgctgtcattatcataattgatcagccccagtctttcagacataccgaacttcgtgatcattgattttgcaattgctgttgcctgcttgatatcctgggaagctcccgttgtgatatcatcaaaaatctcttcttctgcaacacgtccgccaagggaaactgtaatttcctgaagcatatgcccctttgtattgaacatatcatccttctccggaagcggcatcgtatatccgccggctccgcctgtcggaatgatagatacgctgtaaaccggtcctacatccggaagcagatggaacaagatcgcgtgtccagcttcatgataagctgtaatcctgcgttctttctcagaaacgatacggctcttcttctccggaccgattccgaccttcacaaatgcatgacggatatcagactgctgaatgtacacccgattctccttcgctgccagaattgcagcctcattgagaagattctcaagatctgctcctgaaaatcctgccgttgtctgggcaatctgcttcagatccacatcatctccaagcggcttatttctcgcatgaactttcaggatctcttctctgccgcctacatccggacgtccgacaaggacatcacggtcaaatcttcccggtcttaagattgcaggatccagaatatccttacggtttgtcgctgccattacgataatgccttcatttacaccaaatccatccatctctacaaggagctggttcagagtctgctcacgctcatcatgaccaccgccaagaccgcttccgcggcgtcttgcgactgcatcgatctcatcaataaatatgatacatggtgcgttcttcttcgcatcctggaacagatcacggacacgggaagcacccacaccaacaaacatctcaacgaaatctgagcccgaaatgctgaaaaatggtactcctgcctcaccggctacagcctttgcaagaagtgtcttaccggttcccggaggtccttctaaaagaacacctttcgggatacgtgctccaacctggatgtatttcttcggatctttcagaaaatctacgatctcctccagttcttccttctcttctctcaatcctgcaacatcacgaaatgtaaccttgatctcattcttcgtactcatctttgcgcggctctttccaaagttcatcgccttagaatttcccccgccgttctgacggctcatcaggaaaaagatcagaaatactcctccaagtgtgatcagcatcggaactacaactgttgtcaacatagaatccttcggtacatccgaaagcctgtactccacctgattctctgtcagaagcttctctacctgctcaacatctgacacattcactttccttgtattaccatcatctttcaatgtaacagagacggttcctgtcggaactgcactgttctgattgatgtagacatcagaaacatttttttcctgtactgcagagacaaaggaggtatatgtcatctcctgctgatgcatctgaagctggttcgccatccacagaaccacaacaaggatcacaacaaaactgatgatcgttgccccactcagacctctgctttttctgtcattattcaatttattattgcttcctttctattctgcgacttctactactccgatgtatggaagatttctatacttctgtgcataatccagtccgtatccaactacgaactcatccggaatctcaaatcctgtccagtctacgtgcacatctttcacacggcggtctggtttatcaagcaatgtgcaaagacggagacttgccggctttctctgacgaagtacgtccatcagataatacagtgtattaccggaatcaatgatatcctccacaatcaatacttccttattctcaatagactcatccagatctttcgcaagtcttacaacaccactggattttgttccgtctccatagcttccaacacacataaagtccatagataccggaactgtgattctctttgcaagttcgcacataaagaatactccacctttcagaacacagatcagatggatctgctttccttcatactctttactgatcttttctccgagttcacggattcttgcatctacttcttcctctgaaattaacactttaatcttctcagccattgttctattcctccataatctttatcttaagaatctttttcgtctggtctcccacctggtagtacgaactcatccttctgcccggaatccatacgatgtggctttcctctgcgatcagaagctgtctgtcccgttcttcttgcggaatcttctcatcaataaagtaactcttcagcttctttttctttccttccccatcaattgtaaaataatctccgggccgtctgtatctcacacagagactgctttttattatatcataatcaaagcatttcgtgtagcttttttgtggtatctcttttgctgaattcttctcattttcaccgctgattgtacagcagattttcaaatttgttcccgggatctgtgtttctcccggaatctgaagctgtagaacaaaattactctcttcttttcttttctctttctgatgtacagatgtaacttttttatcaccttttgtaagcagaactccctcatacattcttttggctgtaacactatacggaagatcgatctgccgtcctgtctgccgttcaaacagttgcagtaccgccaggatatgcctgctttcaatatctttctgtgcccctgccacttcacttactgatctttggatcagtaatttctttatcacaggatcaaggtgtttcatttcctctgccttgagaaatatttctttcctgctttgaagtccgtctgtctgttttacacagatattccatgcctgatctgtctgtttttccagatattcatagatttcttctgcctgttcactgagcttcacaaaatgttctaccgtccttgtattaacctgttcttctaatgtcggaattacatgatgacgaatccggttccttgtgtattcatcttcctgattcgtttcgtcaacacaatatctgatatcacaatctttcaaccactgttcaatctcttccctggacaattccagaagtgggcggatccattttccatacactggtcttatcccacacaatccgcgaagcccggttcctcttgccatgttaagaagcattgtttctgcattgtcattactatggtgcgctgttgcaatctttgtcccgccctgttctttacagagttgttcaaatgcctgtcttcgcacatatctgcctgcttcctccaatgattctttccgcttttttgcaattaattccacattttcatgaaatgcaaaaaaaggaacctgcattttatgacaaagcatttccacatatgcctcatcctgtgcagcctcctccccgcgcagttcatgattcacatggcagataagcacctgaaatcccagcttttcctgcaatgaacaaagtgccatcagcagacatacagagtctgcgccacccgatacacctatgacaatcctgtcccctttttctatcatatgatattgtctgatatagttttcaatcttttctaatcttttatccatcatacctcaactatacgttaacgattacttctatgtcaatgactactttctgcatttccacaaagctgcaaccaaaactgacatatcatcctccggttcttttcctgtccagttaagtacctgctgtaaaatgtgtctggccagttcctttgggtttcgtatttccgttccttttatgattgtttcaagaaggaagtcctgctctcctaccggaagtgcatccagcactccatctgtcagcatgattacatacgttccatccgtcaactgccgtttcactgaatctatttcaagtgaattcatcactccgatcggaaggcttgtcgatgtcagatgctcaatctgatcctttcttcggataaaagttgaggatgcgcctgccttgatcaattcacattctcctgtatacagatcaaacactgtaaggtcgatcgtagagtaatggatttcttctcttccgcagaccagtgttgtattgatcatctggatcgcagtcttttccggaaatcccgcttccagaagttcttcgagaagttctatcacaagtgtgctttcccgacaggcagcctgcccacatcccatgccatctgacaatgcaactccccttttaccacccggaagatccatcatcgtgaaactgtcccctgaaatattactgcagccttttccgattcttgctattccggacattgtgtaataggatggtccttctcggaagaccactgttgtataatccgctccgatcaactgcgccccttcttttcccggaatcaatcttcttcctgtcagattactcagaatccctgccagactttttaccggaatcttttccgctttccaggtgcgcatcgtcagatgcaattcatattttccctctccattcacaagaaaatgcatggaaagtacacgtattccttttctttttaattgagacaagatccgtttccccaacctttcatctgtaaatatgctgtcttccaggtttttcgccacattttgcagcatatctgcaaatagatcaagctgggctgcacacccttcccggcttcttgcgatacgattgatccagatcatattttgtcttgcttcgtgaaaactgtcaagcatcccccgataaaaccgcggagctataatgcatcgctgcatcagttttctttttgtctctgcatccagttcatttccatactgatccactgctgcaagaatctcatatcccatctgatacatctgaatatagttttcgccccagcaccaactgtttttctcacatttttcacacacttcttctcttacgcaggcaaacatttcatcaatctcttcttctgaaaatgtctgttttttttcttctaatttcaaaaatgttttcgctaactgttttaatgaaactgcaaacttatcaatctgttccacatatagactactatgtaatacctgtccattttccatttccatcccccctcgttactcaaactgtgagaaacacactccgcgagtttctcaagttatcgcggcagtcgccaaggtctcgtgcaagcacggattttggctcgttgttcgcgtaaaaagaaaaactccaggagaactttctctcccggagttatctttcgtaaaattctgtatccgtctttcactgactttgcagattcggttactattcacttgattggtttaaatacgatttcattcggatcaacaagattcagcttatcttctgcgatctctttcatgtaatcatctgtctgtacatactgctcgtattctttgatctcttctgctcttgcctgctcacttttgatctgtgtcttcagttctgcttcctgctgtttatacgctgtattctttgcatgaagctttactgcattcactcccagcacaccggaaagaagacacaatactgacaaaatcataagaacgcttcttttgtacggacttggacgtctctgctttgtataactgcgccgtccagtcactctttttttctttgccatctaaaattcaccctaaaataatacactcttaacgttaccgggaaatcaatcctgccttcactgacggagtccccctataaacttcccaattatcaacattctatctgttttttctaataatttcaaggtttttccttgtttttttgtgtattttttctccagacgaaatcagtttctgaataacggcaacgccaaatacaagacctagtagaaaataccatctaatactaccatacgtagttgcatatatctgtgagaaaatatatgcactcataaatatccagtagaacagatcctcgattcctttcaccagattattatgtattatcattttccttaaaaaaatcaggatctcgtacccagcccggacattcacacccgtaagacaggcacagaagaagacaagcagttctttttttatatttagcatcttctttcttcctcacttgaacatctttgtccaaaagctttcttcctgtttctttgcctgtgaaatattagaatatgaaacactgtctattgttcccgacaaatctacttctcccttttccacactgagacggttcacatgcaagtctgttccttttaccaacagcattccctgctctgtttccagaagaatctcattcagatcaaaagacaatacatccagaacacctgtcaccatacttgtcttccggttattaaccaccagcttatgagcttttacagtcttttgctgttcctccatccgctgcacctccctcttctctggcataccccacagtatattactggaaccagataacagttccctgtacttttctatatatatgtcagagcttttacacttattccttacagataagggttttatatgtgtgcgttcgaaaatgctttattgtatagcatacagaaaggcagggaatatctcactttgtaaaatattccctgcctttctaagattactgaaaacaataaccattgatcgacttatagattcctgttgtctgacagactttacaggtatttaaataagtcctttgcttcttctttttttgttgtctcctgcagttcaagaacctcaaccttaacgattctcgttccaaactgaatctcgatcacatcacccggctttaccttcacagatgctttcgccgtctttccattcaccagcacacgtcctgcatcacaggcctcgtttgctacagttcttcgcttgatcagacgggagacttttaaaaacttatccagtctcatatattcttctacaaaatcccctgaactagttgattgcgtcctttaatgcttttccagctttgaatttaggagccttgcaagctgcgattgtcatagtttttcctgtctgtgggtttcttccttctcttgctgctctctcgcttacttcaaatgtaccaaatccaacaagctgtactttatctcctgctttcagctgctctgttacaacatcaacaaatgcctttaatgctttctcggaatctttcttggaaatctctgccttttcagctactgctgcaataaattctgttttgttcatggattatgtcctcctttattgtactcaaatacaattctattcctaattttatttattcaggttacaagtctgcacgataacttgcctcaaacccttatgtactgttataacggtttccctgttgtttgtcaagataaatccacattttccgcggtttgcggagctttttattcgaagacctctctcaaaaatacttctttctccttcgtctgttctactgctgtctgcagcttctctacactcttttccggaagccatgctttatttgatctggaataagcacttgctgtcttccagaacttttccggataggccagtcgaaggcaaagatactctctttcatctggttttaattgccgtacgctttcatatgcttctaatatattttgtcctgttttttgtttccaatggtatttttccattacttttctcaaaaggtaatataaatcgtctacttgtattccgattcgcatccgctcaaagtttgttatcacctcattttccggaaggatcatgacattatgataattataatctccatgaagcattttcctttcccgtatacttctttcatatagattctggcaaccagaccgctctatctgctctgtcaccttttctgcctgccatgcaatttcttcataatgcttcagataataggattcgaattcattttttgcaactcgttttctgataaatgaccgcacttttttcatttccctgttacgacgtttcatttcttccaatggatttttacttaacaatggtgacaactttgtccagtccattttcttttcttcacaaactgactgctgtgtattctgtgagatttcctgcacctcttctttctggaatttctgaaatatttctttctcctgcaagtccggctcataccactgaaattccagatgaagctctcccagttttcttgctgcccggaaaatatcttcctctctcttcagattgcactcttcccccggataccattttttcatcaaatatcttgttccatctctggaattctgcaccagattcccttctttactgaacacaggtgtatccaccagatatccctgcttttctaatcggtttaaaataagatataataaagggacgcgcctctccgagatctttgtctctttcagaagcatcgtcccttcttttgtatcacaataaaatgcacctctgatccgccgggtgctattcacttcaagttcgtacttttccagtacttccatctcatattctctcatggctgccccctgtcccattgacctggattattattcttttccagttaccagactttttactgtcggttttaacagcaaccgacaacgatttctttctaatctatgaaagggacaacctgagtattctctttttcttccggtattttctacttttctttttccattttttctttcacgtacttgcagagattctctttcgtgttccgttccggatcatccagcacatattccagcagttcactgagcattgcaccgagttcgcgtcccggcttcatccccagttccatcaattctcttccgctcaccgcaagctgtcgaagagtcacgcactgattctccatcaggatctgtttgtaaagatttcttatctctacgatattttcaatcttttcccttctcatgtaagtgctctgtgattttgcatctgcaagacgcactgcgagatagtatgggaataattcaacaccgatccgattcattgcacgacgtacattcgccggtgttgcttccatccggtaatcatgatagcagaccagcttcgttacaatgcgaatcgtctcattgtcaaattttaaccgcttcaaaactgtacgggcaattttctcgctttccagagcatgtcctttgaaatgatcgtttcctttctcatctgttgtcttcattgccggttttcccatatcatggaacaacattgtaagacgaaggtatttatctctcttcacatgcttcaatgtatgaagtgtatgctctgccacatcgtacttatgatgtattgtattctgttttactcctaccatggcgtcccattctggaaggaccacctttgtaattccaagttcacaggcatcctgaatgcgctccggatgtggagacgtcagaagtttcacaagctctgtctgaatacgttctgcactaatattcttaaggtttggtgcaagctccttcactgctttggcagtatcaggttcaatcgggaaatccagctgtgctgagaagcgtaccgcacgaaggatacgaagtgcatcttctgaaaatctttccctcggatctccaacgcaacggatcagatgatgattcaaatcctgcattccaccaaacacatctaccagccggacatcatcattatatgccatcgcattgatcgtaaaatctcttctgcgaagatcttcttccagacaattggtaaagcgaacttccttcggatgacggctatcctcatatgcaccgtcaattctataagtcgtcacctcataactgtctttgccaatcattactgtaactgttccgtgttctattcctgtatcaaccgtccggcgaaatatttccttgattgcttctggttttgccgacgttgtgatatcccagtcctgcggttttctcgccaaaatagaatctctcacgcagccacctactgcaaatgcatcatatcctgcaagttgcagattattaatgataaacaataccttctttggtaattctatcttcatttactacttccttcctatattagtaaaagtttcttttttctctctattaacagattaatattataactgttctttcttgttgtctcaactattttagcacagtttttcttcttttatcagcataaaatcaaaaggatttccatgaataggcaccaactcttatttaataaactatgagaaacacgctttgcgagtttctcaagttatcgcgacagtcgccaaggtctcgtgcaagcacggactttggctcgttgttcgcgtagatagaaaacaggcaaactctcttctattgaaagtttgcctgctcataataaaattcgttactccgtctcttttaaaaatgtgctgaatctcactccgtcctctgccgcatctgccagattcacacagctgtttccgattctttccacattatgtagaatctcattgaatgcagccgtaagtcctgccttacattttcctttgtgtacacgtttaatatgtccttttctgatatctccgtccatcttgcggatcttttctttcatcttgacaagattttcagcctcatttgcctcttcattattaaccattttcatgaccatattgtacatttcactgacaagttccatgctcttttgtatatcctttgatgcttcttgcgagaactgtactctttcttcttttgcactcttcttgtcctttttcacaagcttttctgtctgcatggaaacagcgacatttttcgtaagttcactgattctgtcaatatcgatcaatacatactgaagctctgcggctcttgctgcctgctgctctgtcataactccagccgctgccatttctgcaagataatctgtgatttttcctgtaagttcagctgtcacttctctgctttttacaaattcttcaacagaagcaccatctccactatcaatcttttctgctgcctttttcagtatcacgcctacctgctctccgcaattcatcaattctcttactgcaagctgtaatgcaactgtaggctgactgatcagtttgttatcaagaaattttggctgcactgcattgacttctttcacttctccgtccgggatcagacgcattacgattttcaccataactccaacaagcggtacccagatcagcgtcatcacaaggttgaaaaatgtatgtgtattggcaatctgtctggagatcacttcaatctccggtcccttaggggaaatatactggataaatgctgccagtggttttacgaaccagataaacaggaagcatcctgaaatattaaagatacagtgtgcaagtgctgttctcttcgcatccttcggctgaccaatacttgccagaagtgctgtgatcgttgttccgatattgtcaccgaaaagaatcggaattgcacctgccagaccgatgatacttgtcactccatcagctcctggctgagccgcaaaattctggagcactgcgattgtagcactggaactctgtactacaagagtcattaatgcaccaacagcaactccaagaatcggaatgtctgccactttgccgatcagttctgtgaaaatagggcttgatgctaatggtttcataactgttcccatcgtctcaattccaaggaacagtaaaccgaacgcaaaaatcgtcataccaatattttttacacgttctgatttagagataaaatatacgataaatccaataaaaatgattgcataaatgtagtcacttaacttaaatgcaatcagctgtgctgtcattgttgtaccgatattggcaccaaaaataatagaaattgcctgtggcagtgtcatcagtcctgcacttacaaaaccaatcgccataaccgtcgttgcacttgaactttgcagtacggctgtaacaagcattcccgcaagtgctcccattacaggatttctcgttaaaagtgacaggattttcttcattttttctcctgccgctttctgaagacattcactcatcatattcattccatagataaaaaccgccaggccaccaagcagcccgaaaacaatctgtatgttttccttcatttttcttcctccagatcctctctcatgtctgttttcaattacaaatcactgtcttgcatctgtttttcaaacgcagtgcttttttcttctttacatatccgagattatcatggctttataaaaaactctgtgaagttatgttaaatctatgttaaatagcgaaaattttattaaaatcccttttaaataatgttaaaaccaggttagttatctataactttcttattctttgcagtctttcacttcaaacgataaaccggactggttttccacattcgatatagaaaaaaagagtgttatccacacactttactgttcatgtgtgaataacactctaaaacttctttatattattacagttcgcagttgtttactgttcttgggaacggaatgacgtcacggatattggacattcctgtcagatacattacgcatctctcgaatccaagtccgaatcctgcatgtcttgtagaaccatattttctcagatcaaggtagaatccataatcttcttccttaagtccaagttctttcattcttccaagaagcttgtcataatcatcctctctctggcttcctccgatgatttctccgattcccggtacaagacagtctacagctgctactgtcttaccatcttcgttcatcttcatatagaaagctttgatttccttcggataatctgtaacgaatacaggacgtttgtatacctgctctgtcagatagcgctcatgctctgtctgaaggtcgcatccccaggatactttataatcaaacttatcattgttcttctcaaggatctctactgcctctgtgtatgttacacgtgcaaagtcagagttcactacattatgaagtctgtcaagaagtcccttatcaacgaaagagttgaagaagttcatctcttccggtgcattctcaagtacgtagttgatcacatacttcaacatagcctcagccagttccatatcatcttcaagatctgcaaatgcgatctccggctcgatcatccaaaactctgccgcatgtcttgttgtgttagaattctctgcgcggaatgtcggtccaaatgtataaatattgcggaatgcctgtgcataagtctcaccattaagctgaccgcttactgtaaggcttgtctctttcccaaagaaatcctgtgtataatctacagttccatcctcattcttcggaacattgtccatatccagtgttgtaacacggaacatctctcctgcaccctcacagtcacttcctgtgatcagcggagtgtgtacatatacaaatcctctgtcctggaagaactggtgaatcgcatatgctgccagagaacgaactctgaatacagcctggaatgtgtttgttctcggacggagatgagaaattgttctaagatactcaaaactgtgacgcttcttctgcagtggataatctggcgcagatgctccttcgatcacaacctcttctgcctggatttcaaatggctgcttagcctgtggtgtcgctaccagtgtacccttaacaatgattgctgctcctacattcagcttggaaacctcagcgaagttctccatcttatcatgatatacaatctgtaatgtatcaaaataagatccatcattcaatacgataaatccgaatgtcttagaatctcgaatgcttcgaatccagcctccaactgttacctctttgtccagatatccctctctgttcttaaataactcacgaattgttgtcagttccataccatttactccttcaaataattcttctatctttttctattatcagaatcttcaaacagatgcctcccggcagtcttaacagttattataacactccaggagcgcagagtaaataagaaacaactgatatcactatgtatttcatctattttctcagtttttccagttctgccctcaaccggatcagttccttttctgcctccagtgattctttctccgctttcagtgtttccctttcctgctttattgcttttactttttccctttcctctccaagagcctcatccaactcgtcaatcattagttttactgtattacgatccaatatttccagttcttttgaaaacatccccatcatcctttcgctgttccggcagatgttatagatttcttcataaatgtcctttgaaaaactcttgaaaacactattactttttttatgtctcgataatgaaacttttttcctaattctcttcttactcttttatactgtcttaataacatatcagccgaataacatgcactacgctcccctggaaaaagatatccgatagtgtttctccttctgttttttactcccggccagaagtagatatagaataatttgatgcacttgaaatttcaatgtgttttttgttcgtaactcatcttttttgttgataaaatgaggatatcttttttctacacaaaacaatatttttctaaaattttccaggtgaataactttataaacatattttgcataattactattgcttacggatgcttataaaccgtacaaataactgtcctaaagcaataaaaatctcgaattttgtatctatatataaacatacctttcctctcttgaaatccaatattttctagtataaaatattctcgttaaattcttgacgaatagcaatataacaacggcagttctcttactgtgttaccattcacagcaggagagctgccgaattacaaaagaataaggagttatatcatggacaatcattttaacactcccgcagaagtcattgatctgagtatcaaggcctgcgagaacaaaacccatcttccacttggaaaaatgattctgctcggcatcatggccggcgcgtttatcgctttcggcggtgctacaagcagcacggcagcacacgcagtagaaaatgttggcgtagcaagagctcttgccggatgtatcttccctgtcggactgatgctcatcgtatttcttggcggcgaactttttaccggaaactgtctaatcatcatggacgtgtttgacaaacgtgtcacatggggcggattattccgagatcttttcatcgtatttttcagtaacctgatcggtgctctttgcgtggatctactcattgtatacagtggaaacctgaactactcaggcggacttctcggtgcttatacaatcaaagttgctgttggaaagatcgcaatttcaccactgcagggaatcacttccggaatcttatgtaatatcctggtatgtcttgcagtactgatggctacttccgcaagagatattgccggtaaggtatgggcaattttcttcccaatctgtgccttcgtagtcggcggattcgaacactgcgttgccaatatgttctatatcccggctggtatccttgcttcccttaatccggcttatgttgcgaaagcagaagaagcttacggaattacagctgaacagattgcaacactgacaccacttcacagccttgcaaactttattccggttacacttggaaatatgctcggtggtatgatctttgtcggacttccgctgtatctgatttataaaaagaactgggaaaataaataaggactgttttaaagaaaaactcatgtgaatttcttttaacgaactcacatgagttttttctatctctgagattgttggcgtaggtgctcaaaaaaagaacctgaaacaaatcagtttcaggttcttcagaggcgcagaccggatttgaaccggtgaatcagggtgttgcagacccacgccttaccgcttggctactgcgccgtatttatttaactattaaagtatagcaaaatacatgcagtacgtcaatggtgttttctttgatttttaacttcattattcaacttctacaggaatgaatgaaaatgttgtcacatcaaacaatcccatatctgtcagcttaatctccggaattactgcaagtgacataaagcacagtgtcattaccggctccacatctccacagattccaagttcttcatatgctttctcgtgaatatctgtcagtttctgatctacccactcaccactctgatcactcattagtccggcaatcggcattggcatgctctcgatcacttttccttccttcacaagaacaataccaccttcctgctcgatcagactgttcacggcaaattccatctcttcatcattaactccaacaacaatgatgttatgagaatcgtgagccactgaaagtgctacagcaccttctttgattccgtatcctttcaggaatccacaagctacattccctgttccctgatgacgctcaacaacagctacttttacaagatcaacttctggatttcttacgaactctccatttgcatccaactcaatctctgctgtatctttcgctgttacaactccacccggaagaatcttgattacatttactttgtttgatttcaggttcattttaaatttctctttggagaaatcttttacgatcacacttcccttaacggaagaaatatcacattttttgatctccggcagatattttccttcttctgccaccagagcaccttctacaaatacacggtttacatggaaatctttcagatcatccagaagaacaacatccccacggtatcccggtgcaattgctcctctgtctttcaggtcaaagcattctgctgcgttaagtgttgccatacgaattgctatcacaggatcaagaccttcctctacacagatacgcagatgattatcaagatgtccttcgtgaaggattgtcttcggctgacggtcatcagaacagagcaggcatcttctgctgttctctgctgtcacacctttaagcaatgttcgaaggttatggcatgctgatccctgacgaagcaaaatgtacattcctctctccaatcgatcactcatctcttctacggtagaacattcatgatcagctgcgattcttgctgccgcatatgcattcaattctttccctgtgattcctggtccatgtccatcaataaatttgccttcctgttttgctacaatgatcttatccagatcactgtctgccgcattgatcacgcccgggaaattcatgaattcaccaagtccggcaattccttctcttgtgatcggctctttcattgcttctgcatcgatcaccgcacctgaatgctcgaatggtgtagccggtacacaggatggcagctcatatttcacatcaagcactgtgttctcagctgctttcatcatatagtccagaccagcgattccacatacatttacgatctcatgtgggtctgccataattgttgttcctccatgtggaactaacaggcgtccaatctcttcaggacttacataagaagattcaatatggatgtggctgtcgataaatcctggcgctgcatatcttccttctgcatcaatcactttcacgccttcatactcaccgatacctgcaatctgattacctgaaaatgcaatgtctccttcctggatctttcctgaaaatacgtttacaatcttacaatttttaatcaccagatctgccggaattcttcctgcagctgtatcaataagtttctttaattccaccttcattgttgctacgtctttcacgtcagaagtcctcctctttatttttcgtctgaatcctctttgcttttaaatggaatcacttcgcattcatttaaagcttcttcgtcttcgtctgaatcttcttcgtcatcttcttcgtcatcttcttcctcaagaaagcttttgatttttgataaacaaattttgattttcctaaacgaattttcaccctttacatcggtttcatctttctctgcatccggcacaaaattctctgatgactcttcctctgtgtcctctgtaatcacaggcatcgcgattgtctcacccaaagcttcggactcttctgagctatctctgttttcggtcactgcctctgtttcagtcgccgtatttatttctgtaattccttctgtctcagccgtttcatttatttcagatgttacatctgtctcagcttcttctgtagttgcatctgtctcaactgctccttctgcttctgtagtcagatctgcatccttctcctcttctatttcgtctgttccattaattccttctaacagcgcatcaactgtcttctcttcctctgacacttcttctacttctgcctctggcttcggttcacacggcatccccactgtaaagcagcttccggatcccaggatactttctgcatccacccatccatcgtgtacttcagcaatccattttacaacagaaagtcccagtccaaaatgaccttctccggcacctaaaggatctcctctgaaaaaccgatcccatacgtgcggcagatccgtctccgaaattccaattcccgcatctgcaatcttacaggtaaattcactgcctttgctttcaacaacaactttgatcagtccaatctcccggctataatcaatggaattctccagcagatttaacaacatcttccgataacagttctcatccacttctgcgtagatctccggttcaatctcatagtctatctgcaccggttcatctgcctcctgaagtctgctgatctgaccttctataattcctgttgtcagttcactgatattcatgcgttttttataagccggctggcatccctgatctgcctttgcaaaaaatgagacttcctgaataaaatctgaaagaatctgtgcctttttctgcaccagttcaatctgccagcgctgacgctgggacagtctccagtcgccaaggcaccatgcgcttcgtgtaagaatcacactgaccggcatccacatctcctgtacaacattttctgcaaaatgtccctcctcgcgcacatcctcaagtaattcattcaatgtcagctgcagtctctccaattccgcatcagattcttccagttccaactgtctggagaaatcttttgttctacagatttccgccgctgactctgccatatctgcagtccgtttcagaacctctcttaccagaaagtatccaattgcaagagatgcgatgaaaacgattggaagtaccaccttcgccatcgcttttgctgactgcgcatctgttccacttatcactgtagcaagaaacaacgcaatgcctgttgccacgaatatgcaccctgtatattttagtgttaattttattttcaaagatatttttttcattcgtactcctccaatggaatctctgacattccaaattagattatagcacattttaaaacagtatgttgtgaaattcttcttaaataaaaagtttttattatgcttttccgccttgtatttctctctgatttgccctatcctaaaaagtaaatatatcagcaaaaaaagatttttaaaacaatttgaaagaaggaaatatctatgaacaattcagtttctcaagaactattaaaatttcttcaaaagagtcccacagcgtttcatgcagttcaacagatgagatcagagcttcttgcagttgattttactgaactaaaggaaaatcagcgttggaatatagaatgcggcaaacactattttgttacacgaaatgactcttccctgattgcgtttacaattccggaaaatggtattgacaagatgcacattctgacaagtcatagtgattctccgacctttaagatcaaagagaatccggagatcgaagtagaaaaacattatgtgaaattaaatgtagaaaaatatggtggcatgctctgtgcaccctggtttgaccgtccgctctctgttgccggacgcgttataataaaagataagacaaacggacaattcacgagcaaactcgtcaatattgaccgggatcttgttatgatcccgaatctcgcgattcacatgaaccgtgagatcaatagcggttacaactacaacgcacagaaagatcttctcccactttatggctgcggttctcctaaaggaacttttatggaacagattgctgaagctgccggggtagaaaaagatgaaattctcggtcatgatctattcctttataaccgacaggaaggttccatctggggggcttctgaagaattcatttccagcggcagacttgatgacctgcagtgtgcctttgcatcacttcaaggttttctttctggtgagaaaaaagaatgtatggctgtacactgtgttctggataatgaagaagttggaagcggtacgaaacagggcgccgcatccacgttcctttttgacacactgatccgtgttcacgaagcacttggatatgatggagaagattatcgtgtccatcttgcagacagttttatgatctctgcggataatgctcatgcggttcatccaaactatacagagaaagcagatccgacaaaccgtccttacctgaacgaaggaatcgtgttgaaattcaatgcaaaccagaagtactgtacggacgccgtatctgctgccatgttccgcgacctatgtaagcgggcagatgttccggttcagacatttacaaaccgttctgatatggccggtggctctacccttggaaatatttccaacactcaggttgcgctcaataccgttgacatcggacttccgcagttggcaatgcattccccttatgagactgcaggtgtgaaagatacagagtatctggtacgagctgcaaaagaattcttctgctagtaaaagaaggagcagggatttcattatgacgaaatccctgctctttattttttacaaatgctttttcagcgcatctacataataagatgcataacgactgaaaataatatttttctttttaataataccgatcctcatcgttttatcaacatctaatggcttcgctataatactgcttccatttaatttctggtcgatcacaccactgcttactgtgaatccgtttaatccgatcaccaggttaaataaggttgccctgtctcttacctgtatactcttcggaaaatcaagcatacttataaattcttctgaaaaataaaacgaattattatttccctgttcatagacaagatacggatatggctgtaaatcttccatagaaatcatttctttctctgccagtggatgatctttacagataaatacatgcggttctgcaacaaacatttcctcaaatttcaactgattattctttatcagcttcagaatcacatcttcattgtgttccgaaagataaagaaccccaatctcactttttccgcttgccacatcttcaatgatctcgcccgtctgtgtctctcttataataaaactatactggtctgcatcatattctttgatcagatcaacaaaagcatttaccgcaaatgaataatgctgacaagacacagaaaacttcggtgttcttctctctccatttccaaaatgttctttcatattgtcagcctgctctaagagcatccttgcaaaggacaatagctcttcgccttctcttgtaacagtaacgcctttgttagaccttgtaaatgcagtcactcccatctctttttcaagattatgaattgctgcactaagcgacggctgtgaaataaaaagcttttctgcagcctccgtaatattcccacaatccgcaaccgtaactaaataggttaattgctgtaatgtcatgttcgttcactccttattgaaactgatatccgggcttatcataaaagtattccccataaccatgttgagacaaatggctgtaaaaaaaacataataacacctactgaaccacagatcaaataaaaatcattaatttttgaatctgataaagttcgctttgtaaagttttcggttacaaaacgcacagtaaagtagccgatcaaagtaccgatgctatttgtaatgatatcatctatatcagttgctctgccagtaaaaagttgagaaatctcaacaaaagacgttgcaacaattcctgccaaagcaacactttttatatttctgaattctttccataacattggtaaaaagaaaccaaacggaacgaacaagagtacgttcaaacacgcattaacaaaatctgacaacatataaataaatggaatcagattcactgtaaactccgtttgcaacatcgtgatattcggaaatcccactaatgctaatactactgccagataaaatccaaagatcatataaaccatcgttcgtttccagctctgaaagaaaaacttctcatatataccccaaagcggaattataaaaactgctgctgcaacaagttcgatcagggcgttgtatattctactcattttttcctccatgaattgtattttacacaactcatagtctatcatatccggcctggttacagtagatttagacttcttaattaaacttaagttttcattaagataaaaactatatataggacacaaaattatagaaccacaaagcaacatatgatatactagcaatgttaccgcctcctatactggtacagaacggaggtgttcaccatggatttagcattatcttttattgtcgctgttgcggctggtgtagtttgccactacatcatcaaatggttagatggcgacaaatagccggtaactagcctgtggattcaaacctttccacacaagaattaggaatagaaaaaccctcggatggcactccgagggtttttcgttgctgttcactatggaatagcattatctttttgcctactggcattatagcatatgcaatttaacaatacaatatgcaattttaatagaaagtgggtatgtccttgcttttcttgtcttttcatgctatactatcacccgttacaaaaccctaaaaaaccaaggtcttacaagggtttcgccgatttccggcgtaaggtcatatacttactgtatatgccttccgcggcattcgtcaaatgtccatgcaagcatggccgcctgactcattgctgcgcgaaaatgaatcgagtgttcgtgaccttccactcgtaaaacaaaactaaaggagaactgaataatgaaaaactcaagtaacaaagtgctttacctggcacaggcagccatgattgctgccatctatgtcgtactgactgttgtcggtgcatcactggcttttggagaggtgcagatccgttttgcggaagcactgacgatcctcccggtatttactccggctgcaatccctggattgtttgtaggatgcctcatcggaaacacacttggaggtgcgatcctgcctgacattatcttcggcagccttgcaacactgattggtgccatctttacatggtctttaagaaacaagagcaaattccttgcccctgttcctccggttgttgccaacatcatcgtggttccatttgtattaaaatacgcttatatggttccacttccgattcctttcatgatgctgacagttggtgtcggagaagtgatttccgccggtgtgcttggtctgattctttacggagcacttaacaaatatcgaggaattatctttaaaaaagctttatagatttttcttatgtaacctaaaaacgacaggatcttcatttgaactattgaagaacctgtcgtttttatttcattttctagtaactgttcagagccaacctccaaaatgctacgcatttcgtcggtgtggcgtatccgccaaataaaatttcaaaaacagttttaaaaatgcaagcattttatacctgtttttgaaattttgcttggctctgaacagttacatattctatttgatataaccaataaatgtatttccgcttccggaaaccattccttccatctcgctgatggaaactgtttgcgactctccattttcaggatcgatataagtaatatcattcttcgtatatcctgtcagaagaattgcatgatctgcacttgtaagtgcaatcaccggacatcctctattgatcacgtagagtacctgatccagcgtacatcctgtcaaatctactttctgagcatcatatgtcttcatataacgctcacatgcttcaagtgatgtctcttctccttctttcgaaagagcaacatcctctatcgaatacgcaagatctcgatttcctttctcccagacatatttctggtcagaagagatcacaactcctgaaatctgctgtgctttctgaatagcataagaagctttatcgtaaattcctgccagttcaccgaccccatagacatagtatttcacactttcgcttctatcagcaagaaccatctcaagttcgttctttgatgccagctgattcggtcggatcactttcacgctcttatctcctgctccctctgcaaatgtaatccgcatctgtttttccatcagtgctgttgtatatacttctgttttaatcgccgtatctttgcgttcctcattattcgtaataaactcctgtgaagtaacgttgtaaatatccccgcttttctctacacgattcagtgttaccatattgtcatcaattaaaatatcagaaatataaatgcctttatcaacaaaggaatagctggcaacttttttgttcttagaattacggatttccagttcatacattggagtgatcgattctccagaagctttctttcctgcatcctcagatttcatttttccataaataaagtcaccattgacaaatccaagtggactaattttttctccgcttgctgcctcaacagtattcgtctccagactgcttagattcattacctgaatcactgttccgccactcttatccccttctgactgatatgccatcagatgtccatcatcagaaaccgcatactgtccttctttaagattctctgcaagtgttgtctgtttattctttttcaaatctacctgatacaaagttccgtctgccaaaacatataactgctcttccgcatgattataataaaccatcttgccaagttcatccgctgcgattgcataggacttcttacttggtataaatgctttctcctggatcagatttctctctacatcaaaataatagattccgacaccgacttctccttcgtgttcgccacgattcatatatccatacacagcaaatgcaagattaccactgttgtccatactgatgatacgaactgcatgttgatcattcagattcctttcatctgtcgtatctgcatctgcaaatccgaaaatatttaataattcattcgaactcttattgtacatccaaaggtttctggactccacaaatgctgcaatcgtttctttctcatttgtctcatacggaacatctgaaggtgtaacgccgagcaaaattccgtcttcatcgatcacacttctattctcactgaatacttcctgcatatcacgattgtaatccaacaggtaaattgtagttcctgcgattctcacacggaaaaattccttaatgtcatacactgcattttcaccggcatcatccacgcaggaaactctgtaattcgcaaggagagaggtatacacactattactttcctttatactccaacgcacatcaccaagcaactgtggttgcatagtcccccactgaatatgagaaatatctgaatggatattgactgtctgataagttgtattatcactctcatctccaggttccagataaatattcaatgaatctacatccgtcttattaaatgctttcgtatgaaaatcctgtgcaaatgtaagacattgtgatgctgtaatatcatctgctttctcaattcttgtataaaaattaactttccttgtctctttctcctcgccgatcacaagcgaaacctgaagtactgcctcctggattttatctccaagtgatttccccagctttaatgtgacatcttcgctttctgcagactttagagttcctttatcatatgtctctgttccatccagagaatatacactgtaactgatctcccggatctggttatcatttttctcaatctgcatcttcagtgtaccatcactctctaatggtgtaatggtatctcgcattgcggcaatatccatatcatctacataaccagacaacgcatttatcttctgtccccccatcataaatgagactctaggtaacgtggcatctcccatatccacaacctgatcatcatttccacggttcagtatcacattactgatcaccagcacagccgcaaaaagaacaaccagtgcggcaatctttattaccctttttttcattatttatctcccttttgctctgccagaagcatacctaatgttggctgaatcttcaaaaatctttcacaatcctctgcctcttttctgctctttgctgcaggactcccctttttcactgcacgcagcagaatattcttcggcgtatgctccatatcaataaattctaatacctgagtttcatatccctcgctttccagacgctttgctctaagtccatctgtcacaagtgctgcaaaacgctctcgcaacaatccataatccataattggtccgagcacttcttccatggaagctagttgatctcccagcatttctgaaactcccataacttccgtcttcaatttcatcttgcctgaatgcagatttctctgcttttcaaactgcttgttcacctcatgctgacaacatggaacagacaaaatcactttcgcattccagccaaccgctttcgcaagtgcataatctgtagctgtatcacacgcatgaagcgtcacaaccatgtcaacctgatccacaccttcataatccgcaatatctccaacaaggaatgtcaacttctcatatccatacttctttgccagttcattacaatgcagaatcacatctgtcttcagatctaatccgataatacgaatatcatatccttttaactcgtgtaaataataatacattgcaaatgtaagatatgattttccacatccaaagtccagaagtgtaagctctctgtccttgtcaagctgcggcagaatgtcctcaacaaattccagaaaacgattgatctgacggaacttatccatcttcgtcctcacaatctttccatcctgtgtcataactccaagatcctgaagaaacggaaccacaatcccttcttccaaaatatattttttcttcctgttatgagacagatccgcagctttcgcctggaccttcttgcgctttctcttaatcgttgctttccctttcttactgatcaataccgtgatatcctcactcaccgtctcaacctgaacctgacgaaactcttccaacaatttcgcaagctcatcttttgtctcttctaccgtcagattcttatgaaatgcctgcgtctttgtgaaagactctaactgaaataaaagctcccccttctgttccatcggtcgaagctttgccttaactacattatcctttactcgcgggttactaaacactgcacgaataaactctctattcaaaatcccagctaaaaactgtatgatttcttccatataaatgacctctttttcttatataataaagtagaatctcgaaagactcttcttactattttgcagaataaaaagggagatgtcaagggatataggggacgaaataaagatttatcgtagaaatcatttttcggatatgaggacgaaaactgaaaatattattttagaaagtcgcttgttagaaggatggtacaggaacgccgactcagggttacgcatactgttcatactaggaaaaacaacagactgctaaaagcaaagaaaggattgacaaactcgctgccgctcagacagttgtcaatcctttctttaacgcaatccattgtttttcaagtatgagcaagcatgctccacattcgtcttcgtccctgtaccatccttctaacataaacttctcgaagttcatattttctgttttctgtttactgaaaaaggatcgtcttctacgctaaattttattaaagtaaatacgcttaagaaatgggtatcattctatagaacatccggtgcgtctacttctcaagtagagttcttctttcgagagagcagaaatcagatagcactgaaaacttaccgatagacagacattgagggattgattcaggtgactgttctgtgtgcttggaaagacttgaaaaacggaaggttacgttaaagcaatgcgaggcagctgtctgaagcggcagcgagtttgccgagcattgctttgtttttagtaatctttcgtttttcttagtctttcctgtatacagaacccggagcctgcatcaatccctcaatggctgtctattagaagaaactttataagcgctatctgatttcgtccgcactcgaaaaagaatccctacgataaatctttactttgcaaaaagctctttctcccactcttcttgctccagcaaaaatcctttttcttccagtgcttcttgaatcatatccaatgtattttcactatctgcttctaccacatgataatgataatcggatgtgatatttttcagtggcgtagactttccacttcggatatcatctatgaactctgctgcatttcgtctggaattgatattgagtgcggcttccatatgaccgtagactctgtgattcaccatcacattacgaactcttccaccaagatctacgattgtatagagttcatcttcaacctggtcatcggtatgtttcactttgaagattctttctactaaatgtgattcgtgcaaaatatatcctctgtttgtagatataatgtcatgtcctgcggcacggatgagtgcgatatcctgcacgatcacctgacggcttacttcatactgtgcagccaatgcctttcccggcaccggtgctgagcttgtctttatctgatttataatggcagttcttctttctggtcctgtcatcatgcctcttcctttctaaattgaaatccatactaataattgttctttaacaattatatcacttttactctacagcatgaaggtttttcatcgagatatcaagaatcggagcggaatgtgtcagggctccactggaaatatagtctacgccaagagctgtcaggcgtccgatgttctcttttgttacatttccggaacactccgtctccgctcttccgtcaatgatcttgattgcttcctgcatctcttctgttgacatattatcaagcatgatgatatctgctccggcttctactgcttcttttaccatctcaagattctcaacttctacttcgatctttcttacaaatggtgcgtagtcttttgccatctcgacagctttctttacgcttcctgcagctccgatgtgattgtctttcaggagtactccatcagaaagattatatctgtggttataaccgccaccaacacgaactgcatatttctcgaagattctcatattaggtgttgtttttcttgtatcaagaagttttgttttgcttccttcaagaagtcctgcaacggaatgtgtataagttgcgattccactcattctctgaaggtagttcagtgctacacgctcaccggaaagaagtacacggatatctcctgttacttttcccatcaactggccgttctttacttcgtctccgtctttacagtaaagttctgtctttgtatctgcatctaacagttcaaatactctacggtaaacttccagtccggcaattactccgtcctgtttacagatcagttctacttcaccttttacataatctttcataactgaatttgttgttacgtcttcgcttgaaatatcttctttgagtgcttcaaggatcaaatgatctgcctgaagtgtcattgtaatttcgttcatctttatatctcctgtccctgtctctatattctttctctactcttctcttaacttttattttttcagcatagattaatattatatcactattattatgccaattcacgtacttttacttcattctctgtacctgagattttatttgccgcacgtttggcaaatacaaggctttccagaagtgaattacttgccagacggttcgcaccatgtacaccgttgcagcttgtctctcctactgcatacaaatgttccatggatgttttgctgtctgagtcaacccatacaccacccatgaaataatgctgtgccggaacaaccgg
